(19) United States
(12) Patent Application Publication
(10) Pub. No.: US 2025/0002563 A1
(43) Pub. Date: Jan. 2, 2025

(54) BROADLY NEUTRALIZING NANOBODIES FOR CORONAVIRUS AND USES THEREOF

(71) Applicant: UNIVERSITY OF PITTSBURGH-OF THE COMMONWEALTH SYSTEM OF HIGHER EDUCATION, Pittsburgh, PA (US)

(72) Inventors: Yi SHI, Wexford, PA (US); Yufei XIANG, Pittsburgh, PA (US)

(21) Appl. No.: 18/690,481

(22) PCT Filed: Sep. 12, 2022
(86) PCT No.: PCT/US2022/076293

§ 371 Date: Mar. 8, 2024

Related U.S. Application Data
(60) Provisional application No. 63/242,886, filed on Sep. 10, 2021.
(60) Provisional application No. 63/291,921, filed on Dec. 20, 2021.

(51) Int. Cl. C07K 16/10; A61K 47/64; A61P 31/14

(52) U.S. Cl. CPC C07K 16/1003; A61K 47/643; A61P 31/14; C07K 2317/569

(57) ABSTRACT

Disclosed herein are coronavirus neutralizing antibodies and uses thereof for treating and/or preventing a coronavirus infection in a subject.

### CROSS-REFERENCE TO RELATED APPLICATIONS

[0001] This application claims the benefit of U.S. Provisional Application No. 63/242,886, filed Sep. 10, 2021, and U.S. Provisional Application No. 63/291,921, filed Dec. 20, 2021, which are expressly incorporated herein by reference in their entireties.

### STATEMENT REGARDING FEDERALLY SPONSORED RESEARCH OR DEVELOPMENT

[0002] This invention was made with government support under grant number GM137905 awarded by the National Institutes of Health. The government has certain rights in the invention.

### BACKGROUND

[0003] Nanobodies (Nbs) are natural antigen-binding fragments derived from the VHH domain of camelid heavy-chain only antibodies (HcAbs). They are characterized by their small size and outstanding structural robustness, excellent solubility and stability, ease of bioengineering and manufacturing, low immunogenicity in humans and fast tissue penetration. For these reasons, Nbs have emerged as promising agents for cutting-edge biomedical, diagnostic and therapeutic applications.

[0004] A novel, highly transmissible coronavirus SARS-COV-2 (severe acute respiratory syndrome coronavirus 2) {Zhu, 2020; Zhou, 2020} has infected more than 20 million people and has claimed over 700,000 lives, with the numbers still on the rise. Despite preventive measures, such as quarantines and lock-downs that help curb viral transmission, the virus often rebounds following the lifts on social restrictions. Safe and effective therapeutics and vaccines remain in dire need.

[0005] Like other zoonotic coronaviruses, SARS-COV-2 produces the surface spike glycoprotein (S), which is then cleaved into S1 and S2 subunits forming the homotrimeric viral spike to interact with host cells. The interaction is mediated by the S1 receptor-binding domain (RBD), which binds the peptidase domain (PD) of angiotensin-converting enzyme-2 (hACE2) as a host receptor {Wrapp, 2020}. Structural studies have revealed different stages of the spike trimer {Walls, 2020; Cai, 2020}. In the prefusion stage, the RBD switches between an inactive, closed conformation, and an active open structure necessary for interacting with hACE2. In the post-fusion stage, S1 dissociates from the trimer, and S2 undergoes a dramatic conformational change to trigger host membrane fusion. Most recently, investigations into COVID-19 convalescence individuals' sera have led to the identifications of highly potent neutralizing IgG antibodies (NAbs) primarily targeting the RBD but also the N-terminal domain (NTD) of the spike trimer {Cao, 2020; Robbiani, 2020; Hansen, 2020; Liu, 2020; Brouwer, 2020; Chi, 2020}. High-quality NAbs may overcome the risks of the Fc-associated antibody-dependent enhancement (ADE) and are promising therapeutic and prophylactic candidates {Zohar, 2020; Eroshenko, 2020}.

[0006] The VHH antibodies or nanobodies (Nbs) are minimal, monomeric antigen-binding fragments derived from camelid single-chain antibodies {Muyldermans, 2013}. Unlike IgG antibodies, Nbs are characterized by small sizes (˜15 kDa), high solubility and stability, ease of bioengineering into bi/multivalent forms, and low-cost microbial productions. Because of the robust physicochemical properties, Nbs are flexible for drug administration such as aerosolization, making their use against the respiratory, viral targets appealing {Vanlandschoot, 2011; Detalle, 2016}. Previous efforts have yielded broadly neutralizing Nbs for different challenging viruses, including Dengue, RSV, and HIV {Vanlandschoot, 2011}. However, highly potent camelid Nbs comparable to the human NAbs remain unavailable {Huo, 2020; Wrapp, 2020; Konwarh, 2020}. The development of highly effective anti-SARS-COV-2 Nbs can provide a novel means for efficient and economic strategies for therapeutics and point-of-care diagnosis.

### SUMMARY

[0007] Provided herein are coronavirus (e.g., SARS-CoV-2, SARS-CoV, or a sarbecovirus) neutralizing nanobodies and uses thereof for preventing or treating coronavirus infection. The nanobodies disclosed herein are surprisingly effective at reducing coronavirus viral load and preventing and treating a coronavirus infection. In some embodiments, the coronavirus neutralizing nanobody comprises one or more complementarity determining regions 3 (CDR3), wherein the CDR3 comprises an amino acid sequence selected from the group consisting of SEQ ID NO: 1 through SEQ ID NO: 1057. In some embodiments, the nanobody comprises a multimer of one or more CDR3s, wherein the CDR3 comprises a sequence selected from the group consisting of SEQ ID NO: 1 through SEQ ID NO: 1057. In some embodiments, the nanobody comprises a multimer (including, for example, a homodimer, a heterodimer, a homotrimer, or a heterotrimer) of one or more amino acid sequences comprising a sequence selected from the group consisting of SEQ ID NO: 1058 through SEQ ID NO: 2114 and SEQ ID NO: 2117 through SEQ ID NO: 2119. In some embodiments, the nanobody comprises a multimer (including, for example, a homodimer, a heterodimer, a homotrimer, or a heterotrimer) of one or more amino acid sequences comprising a sequence selected from the group consisting of SEQ ID NO: 1058-1072, 1074, 1075, 1077, 1078, 1079, 1080, 1082, 1083, 1084, 1085, 1086, 1087, 1089, 1090, 1091, 1092, 1093, 1096, 1097, 1098, 1099, 1100, 1103, 1105, 1106, 1111, 1118, 1122, 1127, 1128, 1129, 1130, 1132, 1133, 1134, 1138, 1146, 1147, 1148, 1149, 1150, 1153, 1154, 1155, 1156, 1157, 1161, 1185, 1191, 1193, 1194, 1196, 1197, 1198, 1200, 1203, 1204, 1205, 1208, 1209, 1211, 1220, 1221, 1222, 1229, 1234, 1237, 1240, 1241, 1249, 1260, 1261, 1262, 1271, 1274, 1276, 1278, 1286, 1287, 1288, 1291, 1294, 2117, 2118, and 2119. In some embodiments, the coronavirus neutralizing nanobody is conjugated or linked to a human serum albumin binding nanobody or nanobody fragment. In some examples, the nanobody described herein exhibits high potency, with an IC50 of less than about 1 ng/1 ml.

[0008] The method provided herein comprises uses of the nanobodies described herein for treating or preventing a coronavirus infection (e.g., a sarbecovirus, SARS-CoV-2 or SARS-CoV). In some examples, the method comprises administering the nanobody at a dose of about 0.2 mg/kg of body weight. The nanobody can be administered to a subject intratracheally, intranasally, or through an inhalation route. The nanobody has an increased serum half-life or in vivo stability as compared to a control.

### DESCRIPTION OF DRAWINGS

[0009] FIG. 1(A-F) shows production and characterizations of high-affinity RBD Nbs for SARS-CoV-2 neutralization. FIG. 1a shows the binding affinities of 71 Nbs towards RBD by ELISA. The pie chart shows the number of Nbs according to affinity and solubility. FIG. 1B shows screening of 49 soluble, high-affinity Nbs by SARS-CoV-2-GFP pseudovirus neutralization assay. n=1 for Nbs with neutralization potency IC50<=50 nM, n=2 for Nbs with neutralization potency IC50>50 nM. FIG. 1C shows that the neutralization potency of 18 highly potent Nbs was calculated based on the pseudotyped SARS-CoV-2 neutralization assay (luciferase). Purple, red, and yellow lines denote Nbs 20, 21, and 89 with IC50<0.2 nM. Two different purifications of the pseudovirus were used. The average neutralization percentage was shown for each data point (n=5 for Nbs 20, 21; n=2 for all other Nbs). FIG. 1D shows the neutralization potency of the top 14 neutralizing Nbs by SARS-CoV-2 plaque reduction neutralization test (PRNT). The average neutralization percentage was shown for each data point (n=4 for Nbs 20, 21, and 89; n=2 for other Nbs). FIG. 1E shows a table summary of pseudotyped and SARS-CoV-2 neutralization potency for 18 Nbs. N/A: not tested. FIG. 1F shows the SPR binding kinetics measurement of Nb21.

[0010] FIG. 2(A-G) shows Nb epitope mapping by integrative structural proteomics. FIG. 2A shows a summary of Nb epitopes based on size exclusion chromatography (SEC) analysis. Light salmon color: Nbs that bind the same RBD epitope. Sea green: Nbs of different epitopes. FIG. 2B shows a representation of SEC profiling of RBD, RBD-Nb21 complex, and RBD-Nb21-Nb105 complex. The y-axis represents UV 280 nm absorbance units (mAu). FIG. 2C shows a cartoon model showing the localization of five Nbs that bind different epitopes: Nb20 (medium purple), Nb34 (light sea green), Nb93 (salmon), Nb105 (pale goldenrod) and Nb95 (light pink) in complex with the RBD (gray). Blue and red lines represent DSS cross-links shorter or longer than 28 Å, respectively. FIG. 2D shows top 10 scoring cross-linking based models for each Nb (cartoons) on top of the RBD surface. FIG. 2E shows the surface display of different Nb neutralization epitopes on the RBD in complex with hACE2 (cartoon model in blue). FIG. 2e: Schematics of five unique RBD epitopes for Nb binding. The residue numbers of the RBD were shown (from aa 333 to aa 533). FIG. 2F shows schematics of five unique RBD epitopes for Nb binding. The residue numbers of the RBD were shown (from aa 333 to aa 533). FIG. 2G shows an overview of the Nb neutralization epitopes revealed by cross-linking.

[0011] FIG. 3(A-F) shows crystal structure analysis of an ultrahigh affinity Nb in complex with the RBD. FIG. 3A shows cartoon presentation of Nb20 in complex with the RBD. CDR1, 2, and 3 are in red, green, and orange, respectively. FIG. 3B shows zoomed-in view of an extensive polar interaction network that centers on R35 of Nb20. FIG. 3C shows zoomed-in view of hydrophobic interactions. FIG. 3D shows surface presentation of the Nb20-RBD and hACE2-RBD complex (PDB: 6M0J). FIG. 3E shows surface presentation of RBD with hACE2 binding epitope colored in steel blue and Nb20 epitope colored in medium purple. FIG. 3F shows the CDR1 and CDR3 residues (medium violet pink and light goldenrod in spheres, respectively) of Nb20 overlap with hACE2 binding site (light blue) on the RBD (gray).

[0012] FIG. 4(A-F) shows mechanisms of SARS-CoV-2 neutralization by Nbs. FIG. 4A shows hACE2 (grey) binding to spike trimer conformation (wheat, plum, and light blue colors) with one RBD up (PDBs 6VSB, 6LZG). FIG. 4B shows that Nb20 (Epitope I, medium purple) partially overlaps with the hACE2 binding site and can bind the closed spike conformation with all RBDs down (PDB 6VXX). FIG. 4C shows a summary of spike conformations accessible (+) to the Nbs of different epitopes. FIG. 4D shows that Nb93 (Epitope II, salmon) partially overlaps with the hACE2 binding site and can bind to spike conformations with at least one RBD up (PDB 6VSB). FIG. 4(E-F) shows that Nb34 (Epitope III, light sea blue) and Nb95 (Epitope IV, light pink) do not overlap with the hACE2 binding site and bind to spike conformations with at least two open RBDs (PDB 6XCN).

[0013] FIG. 5(A-E) shows development of multivalent Nb cocktails for highly efficient SARS-CoV-2 neutralization. FIG. 5A shows schematics of the cocktail design. FIG. 5B show pseudotyped SARS-CoV-2 neutralization assay of multivalent Nbs. The average neutralization percentage of each data point was shown (n=2). FIG. 5C shows SARS-CoV-2 PRNT of monomeric and trimeric forms of Nbs 20 and 21. The average neutralization percentage of each data point was shown (n=2 for the trimers, n=4 for the monomers). FIG. 5D shows a summary table of the neutralization potency measurements of the multivalent Nbs. N/A: not tested. FIG. 5E shows mapping mutations to localization of Nb epitopes on the RBD. The x-axis corresponds to the RBD residue numbers (333 to 533). Rows in different colors represent different epitope residues. Epitope I: 351, 449-450, 452-453, 455-456, 470, 472, 483-486, 488-496; Epitope II: 403, 405-406, 408,409, 413-417, 419-421, 424, 427, 455-461, 473-478, 487, 489, 505; Epitope III: 53, 355, 379-383, 392-393, 396, 412-413, 424-431, 460-466, 514-520; Epitope IV: 333-349, 351-359, 361, 394, 396-399, 464-466, 468, 510-511, 516; Epitope V: 353, 355-383, 387, 392-394, 396, 420, 426-431, 457, 459-468, 514, 520.

[0014] FIG. 6(A-C) shows development of RBD-specific Nbs for potent SARS-COV-2 neutralization. FIG. 6A shows detection of strong and specific serologic activities after immunization of SARS-CoV-2 RBD. FIG. 6B shows neutralization potency of the immunized camelid's serum against pseudotyped SARS-CoV-2-Luciferase. FIG. 6C shows neutralization potency of Nbs against pseudotyped SARS-CoV-2-Luciferase.

[0015] FIG. 7(A-C) shows identification of a large repertoire of high-affinity Nbs by proteomics. FIG. 7A shows the schematic of high-affinity RBD-Nb identification by camelid immunization and quantitative Nb proteomics. Briefly, a camelid was immunized by the RBD. High-affinity, RBD-specific single-chain VHH antibodies were affinity isolated from the immunized serum, and analyzed by quantitative proteomics to identify the high-affinity, RBD-specific Nbs (see Methods). A VHH (Nb) cDNA library from the plasma B cells of the immunized camelid was created to facilitate proteomic analysis. FIG. 7B shows sequence logo and sequence logo of 120 high-affinity RBD Nbs. The amino acid occurrence at each position is shown. CDR: complementarity determining region. FR: framework. FIG. 7C shows the phylogenetic tree of the Nbs constructed by the maximum likelihood model.

[0016] FIG. 8 shows correlation analysis of 18 highly potent SARS-CoV-2 neutralizing Nbs. A plot showing a linear correlation of Nb neutralization IC50s between the pseudotyped virus neutralization assay and the SARS-CoV-2 PRNT.

[0017] FIG. 9(A-D) shows biophysical analysis of the outstanding neutralizing Nbs. FIG. 9(A-B) shows binding kinetics of Nbs 20 and 89 by surface plasmon resonance (SPR). FIG. 9C shows thermostability analysis of Nbs 20, 21, and 89. The values represent the average thermostability (Tm, ° C.) based on three replicates. The standard deviations (SD) of the measurements are 0.17, 0.93, and 0.8° C. for Nbs 20, 21, and 89. FIG. 9D shows stability analysis of Nb21 by SEC. Purified recombinant Nb21 was stored at room temperature for ˜6 weeks before subject to SEC analysis. The dominant peak represents Nb 21 monomer.

[0018] FIG. 10 shows SEC analysis of RBD-Nb complexes.

[0019] FIG. 11(A-I) shows SEC analysis of RBD-Nb complexes. The SEC profiles of RBD-Nb complexes showing 9 Nbs that have overlapping epitopes with Nb21. FIG. 11(A-H) shows the SEC profiles of RBD-Nb complexes showing five Nbs that have unique and non-overlapping epitopes with Nb21. FIG. 11I shows sequence alignment of the CDR3s of 18 highly potent neutralizing Nbs and CDR3 lengths comparing Nbs from epitope I and others.

[0020] FIG. 12(A-C) shows competitive ELISA analysis of hACE2 and Nbs for RBD binding and conversation analysis of RBD across different coronaviruses. FIG. 12A shows competitive ELISA of hACE2 and Nbs (20, 21, 93, and 95) for RBD binding. Y-axis: percentage of the normalized ACE2 signal. X-axis: Nb concentration (nM). FIG. 12B shows the surface display of different Nb neutralization epitopes on RBD in complex with hACE2 (cartoon model in blue).

[0021] FIG. 12C shows the conservation analysis of the spike protein RBD using the ConSurf web server, oriented as in FIG. 12B. The conservation is based on 150 sequences automatically extracted by the ConSurf server.

[0022] FIG. 13 shows structural comparisons of Nb20 with published RBD Nb structures. Overlays of Nb20 (purple ribbon) and three other RBD-Nbs (PDBs 6YZ5, 7C8V, and 7C8 W) in complex with RBD (yellow/grey ribbon).

[0023] FIG. 14(A-D) shows structural modeling of Nb 21-RBD interaction based on the Nb20-RBD crystal structure. In FIG. 14A, alignment of Nb21 with Nb20. The four residue differences between the two Nbs were shown. FIG. 14B shows zoom-in views showing the addition of new polar interaction between N52 (Nb21) and N450 (RBD). The model of Nb21 is superimposed based on the crystal structure of Nb20. FIG. 14C shows surface presentation of RBD. The hACE2 binding epitope is in steel blue and the Nb20 epitope is in medium purple. FIG. 14D shows structural alignment of Nb20-RBD complex with hACE2-RBD complex. The CDR1 and CDR3 residues (medium violet pink and goldenrod in spheres, respectively) of Nb20 overlap with the hACE2 binding site (steel blue) on RBD (grey ribbon).

[0024] FIG. 15(A-D) shows the biophysical properties of multivalent Nbs. FIG. 15A shows the expression levels of multivalent Nbs from E. coli whole cell lysates. FIG. 15B shows SDS-PAGE analysis of the purified multivalent Nbs. FIG. 15C shows thermostability analysis of ANTE-CoV2-Nab21T_{EK}, ANTE-CoV2-Nab20T_{EK}, ANTE-CoV2-Nab21T_{GS}, and ANTE-CoV2-Nab20T_{GS}. The values represent the average thermostability (Tm, ° C.) based on three replicates. The standard deviations of the measurements are 0.6, 0.27, 0.169, and 0.72° C., respectively. FIG. 15D shows high stability of the multivalent Nbs under the pseudovirus neutralization condition. Different Nb constructs were incubated under the pseudovirus neutralization assay condition without the virus for 72 hours. An anti-His6 mouse monoclonal antibody (Genscript) was used to detect the Nb constructs (His6 tag at the C terminus) by western blot.

[0025] FIG. 16(A-G) shows stability test of the multivalent Nbs. FIG. 16A shows SARS-CoV-2 PRNT of the homo-trimeric forms of Nbs 20 and 21 with an EK linker. The average neutralization percentage and the standard deviation of each data point were shown (n=2). FIG. 16(B-C) shows the SEC analysis of ANTE-CoV2-Nab20T_{GS} and ANTE-CoV2-Nab21TEK before and after lyophilization or aerosolization. FIG. 16(D-E) shows pseudotyped SARS-CoV-2 neutralization assay using ANTE-CoV2-Nab20T_{GS} and ANTE-CoV2-Nab21T_{EK} before and after lyophilization or aerosolization (n=2). FIG. 16F shows a summary table of the neutralization potency measurements of the homo-trimeric Nbs. FIG. 16G shows a portable mesh nebulizer (producing ≤5 μm aerosol particles) used in the study.

[0026] FIG. 17 shows the neutralization epitopes and virus mutations mapped on the RBD crystal structure. The dashed line (upper panel) indicates epitope V that partially overlaps with epitopes III and IV. The mutations (lower panel) are colored in gradient blue (0-100 mutation count from the GISAID), where darker blue indicates more frequent mutations.

[0027] FIG. 18(A-D) shows composite 2Fc-Fo electron density maps of the representative areas of RBD-Nb20 complex contoured at 1.0σ. FIG. 18A shows map of the whole complex shown as purple mesh. FIG. 18B shows map of the three CDRs of Nb20 as purple mesh. FIG. 18C shows map of the extended external loop region of RBD shown as purple mesh. FIG. 18D shows map of residues involved in the interactions between RBD and Nb20 shown as red mesh. RBD is colored in gray and Nb20 is colored in blue.

[0028] FIG. 19(A-C) shows correlation analysis of 18 highly potent SARS-CoV-2 neutralizing Nbs. FIG. 19A depicts a plot showing a linear correlation of Nb neutralization potency (IC50s) between two different SARS-COV-2 viral assays (pseudotype virus vs. authentic virus). FIG. 19B shows a heat map showing the correlation between SHM and Nb pseaudovirus neutralization potency, Pearson r=−0.408. FIG. 19C shows a heatmap showing the correlation between ELISA affinity and Nb pseudovirus neutralization potency, Pearson r=−0.639.

[0029] FIG. 20(A-B) shows structural modeling of Nb 21 based on the Nb 20-RBD crystal structure. FIG. 20A shows a structural model of Nb 21 in complex with RbD. FIG. 20B shows zoom-in views showing the addition of new polar interaction between N52 (Nb21) and N450 (RBD). The model of Nb21 is superimposed based on the crystal structure of Nb20.

[0030] FIG. 21(A-B) shows structural comparisons of Nb 20 with published RBD Nb structures. FIG. 21A shows an zoom-in view showing the cacodylate ion that is embedded in the interaction of Nb20-RBD. FIG. 21B shows structural overlays of Nb 20 and other RBD-Nbs.

[0031] FIG. 22 depicts an example of a computing system that executes methods and procedures described in certain embodiments of the present disclosure.

[0032] FIG. 23(A-D) shows identification and characterization of psNbs. (FIG. 23A) Phylogenetic tree of 19 RBDs from all 4 clades of sarbeoviruses, constructed by the maximum likelihood. (FIG. 23B) The neutralization of polyclonal VHHs from two immunization bleeds against pseudovirus of SARS-CoV-2, its variants and SARS-CoV. Their ELISA IC₅₀s against 4 RBD clades were also shown. (FIG. 23C) Schematics for proteomic identification of psNbs from immunized sera. (FIG. 23D) A map summarizing RBD binding and neutralization for 100 high-affinity psNbs. Nbs are represented by dots of various sizes and colors. Two Nbs are connected if their CDR sequence identity is >70%. Their neutralization potencies against pseudotyped SARS-CoV-2 (D614G) are represented by the size of dots. Breadth of sarbecovirus RBD binding is indicated by the filled gradient color (Table 2) and the SEC epitope groups are colored on the outer circle (FIG. 31). The highest Nb concentration used for binding and neutralization was 8 μM and 2.5 μM, respectively.

[0033] FIG. 24(A-G) shows binding and neutralization of 17 psNbs and development of a bispecific and inhalable psNb (PiN-118). (FIG. 24A) Heatmap summary of psNbs for binding to different RBDs by ELISA. White with cross mark: no binding. Silver: binding signal was detected at 8 μM yet the IC₅₀ cannot be determined. Gradient blue to gray: IC₅₀ between 0.8 nM to 8 μM. (FIG. 24B) The neutralization potency of psNbs against pseudotyped SARS-CoV-2, its variants and SARS-CoV. N/A: no neutralization detected at the highest Nb concentration (2.5 μM). (FIG. 24C) The neutralization potency against SARS-CoV-2 Munich strain and the Delta VOC by the PRNT assay. (FIG. 24D) Binding kinetic measurements of 5p-118 for RBD_{SARS-CoV-2} and RBD_{SARS-CoV} by surface plasmon resonance (SPR). (FIG. 24E) SPR measurements of 5p-132 for RBD_{SARS-CoV-2} and RBD_{BM-4831-CoV}. (FIG. 24F) SEC analysis of 5p-118 before and after aerosolization with soft mist inhaler. (FIG. 24G) Neutralization potency of a bispecific psNb construct (PiN-118) by the PRNT assay.

[0034] FIG. 25(A-C) shows a summary of broadly neutralizing RBD epitopes and spike conformations. (FIG. 25A) Clustering analysis of psNbs epitopes. RBS residues are in yellow. RBD glycosylation sites (N331 and 343) are denoted. SarbeCoVirus sequence conservation is shown in green gradient. The number of psNb: RBD interaction atoms per epitope residue is shown in blue gradient. (FIG. 25B) Structural representations of five classes of psNbs in complex with RBD and the corresponding epitopes. Light green: class I (5p-182), gold: class II (5p-118), pink: class III (5p-93), light blue: IV (Nb113) and purple: V (5p-64). VOC residues are in red. RBD glycosylation (N343) is in cornflower blue. (FIG. 25C) Structural diversity of psNbs in complex with the SARS-CoV-2 pre-fusion spike glycoprotein (by cryoEM).

[0035] FIG. 26(A-G) shows the structural diversity, convergence and evolution of class II psNbs. (FIG. 26A) Phylogenetic analysis of psNbs from SEC group B by the maximum likelihood. Structurally determined psNbs are in red. Scale of the evolutionary distance: 0-0.35. (FIG. 26B) Superposition of class II psNbs reveals two subclasses II(A) and II(B). (FIG. 26C) The overlap between II(A) and II(B) epitopes. Thistle: shared epitope; blue: non-overlapping epitope of II(A); salmon: non-overlapping epitope of II(B); light yellow: ACE2 with modeled glycans (N90 and N322). (FIG. 26D) Structural overview of class II psNbs in complex with RBD and epitopes. Light blue: Nb95 and Nb105; cornflower blue: 5p-60; navajo white: Nb117; dark salmon: 5p-38; gold: 5p-35; brown: 5p-118. FIG. 26(E-G) Comparison of CDR bindings between three pairs of related psNbs. FIG. 26E) Nb117 and 5p-38, FIG. 26F) 5p-35 and 5p-118, FIG. 26G) 5p-60 and Nb105.

[0036] FIG. 27(A-I) shows the structural insights of four classes of psNbs. (FIG. 27A) Superposition of 5p-182: RBD with ACE2 showing steric effects. (FIG. 27B) Comparison of buried epitope surface area between 5p-182 and Nb21. (FIG. 27C) Heatpmap showing interactions between RBS Nbs and mutations from VOCs (Alpha, Beta, Gamma, Delta and Omicron). (FIG. 27D) Surface representation showing all CDRs form extensive interaction with RBD. Purple: CDR1; light yellow: CDR2; Salmon: CDR3; Gray: FR2. (FIG. 27E) Structure superimposition of Class III Nbs (5p-93 and Nb17). (FIG. 27F) Surface representation showing epitopes of Nb17 and 5p-93. Conserved residues with RBD sequence identity >0.85 are highlighted. (FIG. 27G) Structures showing CDR3 of class IV psNbs inserting into the cavity on RBD and different utilities of CDRs. Shared conserved epitopes of class IV psNbs were labeled on the RBD using surface representation. (FIG. 27H) Structure showing CDR3 of Class V 5p-64 binding to RBD. (FIG. 27I) Superposition of 5p-64: RBD on all-RBD-up Spike showing the clash between 5p-64 and spike.

[0037] FIG. 28(A-H) shows the mechanisms of broad neutralization. (FIG. 28A-28B) The correlation between relative cross reactive binding and epitope conservation for FIG. 28A) all Nbs and FIG. 28B) non-RBS Nbs. (FIG. 28C) Surface representation showing geometry features of Nb:RBD interface of 5 classes of Nbs: flat epitope for class II, III and V epitope; convex epitope for class I and IV epitope. (FIG. 28D) Comparison of average root-mean-square-fluctuation (RMSF) between psNb and non psNb. (FIG. 28E) Comparison of viral fitness of epitope between psNb and non psNb. The viral fitness is obtained from evaluating the mutational effects on expression level. More negative values correspond to higher loss of viral fitness. (FIG. 28F) Comparison of utilities of framework residues for binding to RBD between psNbs and non-psNbs. (FIG. 28G) Mechanisms of viral neutralization. Class I Nbs directly clash with ACE2; class II Nbs clash with N322 glycan on ACE2; class III, IV and V do not compete with ACE2 binding. (FIG. 28H) Correlation between neutralization potency and the distance between Nb epitope and receptor binding sites. The distance is calculated based on centroids Nb epitope and ACE2 epitope.

[0038] FIG. 29(A-B) shows an analysis of the total VHHs isolated from serum after RBD immunization. (FIG. 29A) ELISA binding of total VHHs from the initial and booster bleeds against four representative RBDs. (FIG. 29B) Pseudovirus neutralization assay of total VHHs of the initial and booster bleeds against SARS-CoV-2, SARS-CoV-2 variants and SARS-CoV.

[0039] FIG. 30(A-B) shows an analysis of experimentally verified psNbs. (FIG. 30A) Phylogenetic analysis of the psNb CDR sequences and their physicochemical properties including isoelectric point (pI), hydropathy. (FIG. 30B) The individual psNb isolated from either 1st and 2nd bleed was synthesized and evaluated for RBD_{SARS-CoV-2} and RBD_{SARS-CoV} binding by ELISA. The percentage was calculated as the number of psNbs in a certain affinity range divided by the total number of the psNbs.

[0040] FIG. 31(A-C) shows size exclusion chromatography (SEC) and surface plasmon resonance analysis of representative psNbs for RBD binding. (FIG. 31A) SEC profiles of the reconstituted nanobodies of non-overlapping epitopes in complex with RBD_{SARS-CoV-2}. Left panel shows the structures that help illustrate competitive SEC experiments. (FIG. 31B) Competitive SEC of psNbs. Group A psNbs compete with Nb21. Group B psNbs compete with Nb105. Group C psNbs compete with Nb36. Group D psNbs do not compete with any of these three Nbs. Group E psNbs dissociate from RBD. (FIG. 31C) A representative SEC unclassified psNb (5P-156) was covalently coated to the Fc2 of a CM5 sensorchip. Fc1 of the sensorchip was non-coated as control. 1 μM deglycosylated RBD_{SARS-CoV-2} in the HBS-EP buffer was injected to the surface at 20 μl/min for 3 mins with dissociation for 3 mins, followed by a sequential injection of 1 μM glycosylated RBD_{SARS-CoV-2}. The responses were recorded as the difference between the signals from Fc2 and Fc1.

[0041] FIG. 32 shows ELISA of 16 psNbs against the RBDs from the WT SARS-CoV-2, the concerning variants and 18 different sarbeoviruses that span all four clades.

[0042] FIG. 33 shows the neutralization assays of 17 psNbs against the pseudotyped SARS-CoV-2 (Wuhan-Hu-1, D614G), the VOCs and SARS-CoV.

[0043] FIG. 34 shows a PRNT assay of 17 presentative psNbs against a clinical isolate of SARS-CoV-2 (Munich strain) and the Delta variant.

[0044] FIG. 35(A-F) shows biophysical characterizations of highly broad psNbs (5P-118 and 5P-132). (FIG. 35(A-B)) SPR kinetic measurement of 5p-118 against RBD_{RmYN02} and RBD_{BM-4831}. (FIG. 35(C-D)) SPR kinetic measurement of 5p-132 against RBD_{SARS-CoV} and RBD_{BM-4831} (FIG. 35E) SEC analysis of 5p-132 pre and post aerosolization. (FIG. 35F) Pseudovirus neutralization of 5p-118 and 5p-132 pre and post aerosolization.

[0045] FIG. 36 shows structural analysis of Nb binding to VOC mutations.

[0046] FIG. 37(A-F) shows Cryo-EM Structure determination workflow illustrated by 5p-60. (FIG. 37A) Representative micrograph of spike with 5p-60. (FIG. 37B) Representative 2D class averages of spike with 5p-60. (FIG. 37C) Gold-standard Fourier shell correlation (FSC) curves calculated from two independently refined half-maps with different masks for spike with 5p-60. (FIG. 37D) Local resolution map shown at two density thresholds (left: 0.5 and right: 0.1). (FIG. 37E) Masking of the RBD:psNb density for focused classification. (FIG. 37F) Results of focused classification. Classes with strong RBD:psNb densities (blue rectangle boxes) are selected for further local refinements.

[0047] FIG. 38(A-E) shows interactions of epitope II psNbs in complex with the spike or RBD. (FIG. 38A) Interactions between RBD and Nb117. (FIG. 38B) Interactions between RBD and 5p-38. (FIG. 38C) Interactions between RBD and 5p-35. (FIG. 38D) Interactions between RBD and 5p-118. (FIG. 38E) Interactions between RBD and 5p-60.

[0048] FIG. 39 shows structural comparison of Nb113 and an IgG antibody (S2H97).

[0049] FIG. 40 shows hACE2 competition assay with the SARS-CoV-2 spike by ELISA.

[0050] FIG. 41(A-B) shows RBD epitope prediction by ScanNet. (FIG. 41A) The RBD surface is colored by epitope propensity (from blue=0.0 to red=0.35 and higher) using ChimeraX. (FIG. 41B) RBD epitope propensity profile.

[0051] FIG. 42 shows scatter plots of antibody hit rates against conservation scores for surface residues for 11 antigens. A negative trend is found for most antigens. Notable outliers include the envelope protein of HIV and the genome polyprotein of Hepatitis C; this can be due to (i) over-representation of broadly neutralizing antibodies in the PDB and/or (ii) extensive glycosylation.

[0052] FIG. 43 shows scatter plots of ScanNet epitope propensity scores against conservation scores of surface residues for 11 antigens. A negative trend is observed between the conservation score and the ScanNet epitope propensity score which was calculated from antigen structure only. This suggests that the association between conservation and antibody hit rate arises solely from structural properties.

[0053] FIG. 44(A-C) shows comparison of overall structures of 5p-118 and Nb117 bound to SARS-CoV-2 RBD. Structures are shown as ribbon representation. Glycans in SARS-CoV-2 RBD and ACE2 are shown in sticks and labeled with their corresponding asparagine(N) position number. CC12.1 was used to complex with 5p-118 and SARS-CoV-2 to obtain diffraction-quality crystals for structure determination. 5p-118 is shown in dark red, Nb117 in beige, RBD in light gray, ACE2 in light yellow, and CC12.1 in white. Structures of 5p-118, Nb117, and ACE2 bound to SARS-CoV-2 are superimposed for comparison in c.

[0054] FIG. 45(A-C). Representative cryo-EM densities of psNbs in complex with the spike or RBD. (FIG. 45A) High-resolution cryo-EM maps allow the modeling of residue 621 to 640 for the spike protein, which are absent in the starting structure (PDB: 7CAK). The map was contoured at level 0.15. (FIG. 45B) High-resolution cryoEM maps enable the delineation of complex glycan composition at Asn1074 with a Fucose (FUC) attached to the first N-acetylglucosamine (NAG). The map was contoured at level 0.15. (FIG. 45C) High-resolution cryoEM maps facilitated modeling of the RBD (blue): 5p-60 (yellow) interface. The map was contoured at level 0.64.

[0055] FIG. 46(A-D). Cryo-EM Structure determination of RBD with 5p-182, 5p-93, 5p-64 and a class II psNb (1-25) and focused refinement. (FIG. 46A) Representative micrograph of RBD with four psNbs. (FIG. 46B) Representative 2D class averages of RBD and psNbs complex. (FIG. 46C) Gold-standard Fourier shell correlation (FSC) curves calculated from two independently refined half-maps with different masks for RBD and psNbs complex. (FIG. 46D) Local resolution map contoured at level 0.36.

[0056] FIG. 47(A-B). SEC analysis of 5p-182 (2-67) with RBD and benchmark Nbs, and quantitative MS evaluation of Nbs 20 and 21. (FIG. 47A) Competitive SEC analysis of 5p-182 (2-67) with Nb21 and other high-affinity benchmark Nbs for RBD binding. (FIG. 47B) MS quantification of a CDR3 tryptic peptide specific to Nbs 20 and 21. The Y axis represents the total MS1 ion abundance (relative abundance) of the peptide. Signals below 104-5 are generally considered chemical backgrounds. The sequence in FIG. 47B is SEQ ID NO: 2130 (YCAARDIETAEY).

[0057] FIG. 48(A-F). Interactions of class I, III, IV and V psNbs in complex with SARS-CoV-2 spike or RBD. (FIG. 48A) Interactions between RBD and 5p-182. (FIG. 48B) Interactions between RBD and 5p-93. (FIG. 48C) Interactions between RBD and Nb113. (FIG. 48D) Interactions between RBD and 4P-56. (FIG. 48E) Interactions between RBD and 5p-179. (FIG. 48F) Interactions between RBD and 5p-64.

[0058] FIG. 49. Comparison of the utility of framework residues of psNbs and non-psNbs for binding to RBD.

### DETAILED DESCRIPTION

[0059] Provided herein are coronavirus (e.g., a sarbecovirus and/or SARS-CoV-2) neutralizing nanobodies and uses thereof for preventing or treating infection of one or more coronaviruses. These nanobodies were elucidated through an application of our integrative proteomic platform for in-depth discovery, classification, and high-throughput structural characterization of antigen-engaged Nb repertoires. A collection of diverse, soluble, stable, and high-affinity camelid Nbs that target the SARS-CoV-2 spike protein receptor-binding domain (RBD) were developed and characterized. The majority of the high-affinity RBD Nbs efficiently neutralize SARS-CoV-2, and in some embodiments, efficiently neutralize another coronavirus. A subset has exceptional neutralization potency, comparable with, or better than the most potent human NAbs.

### Terminology

[0060] As used in the specification and claims, the singular form “a,” “an,” and “the” include plural references unless the context clearly dictates otherwise. For example, the term “a cell” includes a plurality of cells, including mixtures thereof.

[0061] The term “about” as used herein when referring to a measurable value such as an amount, a percentage, and the like, is meant to encompass variations of ±20%, ±10%, ±5%, or ±1% from the measurable value.

[0062] “Administration” to a subject or “administering” includes any route of introducing or delivering to a subject an agent. Administration can be carried out by any suitable route, including oral, intravenous, intraperitoneal, intranasal, inhalation and the like. Administration includes self-administration and the administration by another.

[0063] The terms “antibody” and “antibodies” are used herein in a broad sense and include polyclonal antibodies, monoclonal antibodies, and bi-specific antibodies. In addition to intact immunoglobulin molecules, also included in the term “antibodies” are fragments or polymers of those immunoglobulin molecules, and human or humanized versions of immunoglobulin molecules or fragments thereof. Antibodies are usually heterotetrameric glycoproteins of about 150,000 daltons, composed of two identical light (L) chains and two identical heavy (H) chains. Each heavy chain has at one end a variable domain (V_{H}) followed by a number of constant domains. Each light chain has a variable domain at one end (V_{L}) and a constant domain at its other end.

[0064] The antibodies can be tested for their desired activity using the in vitro assays described herein, or by analogous methods, after which, their in vivo therapeutic and/or prophylactic activities are tested according to known clinical testing methods. There are five major classes of human immunoglobulins: IgA, IgD, IgE, IgG and IgM, and several of these may be further divided into subclasses (isotypes), e.g., IgG-1, IgG-2, IgG-3, and IgG-4; IgA-1 and IgA-2. One skilled in the art would recognize the comparable classes for mouse. The heavy chain constant domains that correspond to the different classes of immunoglobulins are called alpha, delta, epsilon, gamma, and mu, respectively.

[0065] The terms “antigenic determinant” and “epitope” may also be used interchangeably herein, referring to the location on the antigen or target recognized by the antigen-binding molecule (such as the nanobodies of the invention). Epitopes can be formed both from contiguous amino acids (a “linear epitope”) or noncontiguous amino acids juxtaposed by tertiary folding of a protein. The latter epitope, one created by at least some noncontiguous amino acids, is described herein as a “conformational epitope.” An epitope typically includes at least 3, and more usually, at least 5 or 8-10 amino acids in a unique spatial conformation. Methods of determining spatial conformation of epitopes include, for example, x-ray crystallography and 2-dimensional nuclear magnetic resonance. See, e.g., Epitope Mapping Protocols in Methods in Molecular Biology, Vol. 66, Glenn E. Morris, Ed (1996).

[0066] The terms “antigen binding site”, “binding site” and “binding domain” refer to the specific elements, parts or amino acid residues of a polypeptide, such as a nanobody, that bind the antigenic determinant or epitope.

[0067] The terms “CDR” and “complementarity determining region” are used interchangeably and refer to a part of the variable chain of an antibody that participates in binding to an antigen. Accordingly, a CDR is a part of, or is, an “antigen binding site.” Generally, native antibodies comprise six CDRs; three in the heavy chain (heavy chain complementarity determining region (CDRH)1, CDRH2, and CDRH3), and three in the heavy chain (light chain complementarity determining region (CDRL)1, CDRL2, and CDRL3). In some embodiments, the nanobody comprises three CDR (CDR1, CDR2, and CDR3) that collectively form an antigen binding site.

[0068] The term “hypervariable region” or “HVR”, as used herein, refers to each of the regions of an antibody variable domain which are hypervariable in sequence and/or form structurally defined loops (“hypervariable loops”). Generally, native four-chain antibodies comprise six HVRs; three in the VH (H1, H2, H3), and three in the VL (L1, L2, L3). HVRs generally comprise amino acid residues from the hypervariable loops and/or from the complementarity determining regions (CDRs), the latter being of highest sequence variability and/or involved in antigen recognition. CDRs generally comprise the amino acid residues that form the hypervariable loops. Hypervariable regions (HVRs) are also referred to as “complementarity determining regions” (CDRs), and these terms are used herein interchangeably in reference to portions of the variable region that form the antigen-binding regions. The amino acid sequence boundaries of a CDR can be determined by one of skill in the art using any of a number of known numbering schemes, including those described by Kabat et al., supra (“Kabat” numbering scheme): Al-Lazikani et al., 1997. J. Mol. Biol., 273:927-948 (“Chothia” numbering scheme); MacCallum et al., 1996, J. Mol. Biol, 262:732-745 (“Contact” numbering scheme); Lefranc et al., Dev. Comp. Immunol., 2003, 27:55-77 (“IMGT” numbering scheme); and Honegge and Pluckthun, J. Mol. Biol., 2001, 309:657-70 (“AHo” numbering scheme); each of which is incorporated by reference in its entirety.

[0069] The term “comprising” and variations thereof as used herein is used synonymously with the term “including” and variations thereof and are open, non-limiting terms. Although the terms “comprising” and “including” have been used herein to describe various embodiments, the terms “consisting essentially of” and “consisting of” can be used in place of “comprising” and “including” to provide for more specific embodiments and are also disclosed.

[0070] “Composition” refers to any agent that has a beneficial biological effect. Beneficial biological effects include both therapeutic effects, e.g., treatment of a disorder or other undesirable physiological condition, and prophylactic effects, e.g., prevention of a disorder or other undesirable physiological condition. The terms also encompass pharmaceutically acceptable, pharmacologically active derivatives of beneficial agents specifically mentioned herein, including, but not limited to, a bacterium, a vector, polynucleotide, cells, salts, esters, amides, proagents, active metabolites, isomers, fragments, analogs, and the like. When the terms “composition” is used, then, or when a particular composition is specifically identified, it is to be understood that the term includes the composition per se as well as pharmaceutically acceptable, pharmacologically active vector, polynucleotide, salts, esters, amides, proagents, conjugates, active metabolites, isomers, fragments, analogs, etc. In some aspects, the composition disclosed herein comprises the nanobody disclosed herein.

[0071] “Effective amount” encompasses, without limitation, an amount that can ameliorate, reverse, mitigate, prevent, or diagnose a symptom or sign of a medical condition or disorder (e.g., an infection). Unless dictated otherwise, explicitly or by context, an “effective amount” is not limited to a minimal amount sufficient to ameliorate a condition. The severity of a disease or disorder, as well as the ability of a treatment to prevent, treat, or mitigate, the disease or disorder can be measured, without implying any limitation, by a biomarker or by a clinical parameter. In some embodiments, the term “effective amount of a recombinant nanobody” refers to an amount of a recombinant nanobody sufficient to prevent, treat, or mitigate an infection.

[0072] The “fragments” or “functional fragments,” whether attached to other sequences or not, can include insertions, deletions, substitutions, or other selected modifications of particular regions or specific amino acids residues, provided the activity of the fragment is not significantly altered or impaired compared to the nonmodified peptide or protein. These modifications can provide for some additional property, such as to remove or add amino acids capable of disulfide bonding, to increase its bio-longevity, to alter its secretory characteristics, etc. In any case, the functional fragment must possess a bioactive property, such as binding to a coronavirus and/or ameliorating coronavirus infection.

[0073] As used herein, a “functional selection step” is a method by which nanobodies are divided into different fractions or groups based upon a functional characteristic. In some embodiments, the functional characteristic is nanobody or CD3 region antigen affinity. In other embodiments, the functional characteristic is nanobody thermostability. In other embodiments, the functional characteristic is nanobody intracellular penetration. Accordingly, the present invention includes a method of identifying a group of complementarity determining region (CDR)3 region nanobody amino acid sequences (CDR3 sequences) wherein a reduced number of the CDR3 sequences are false positives as compared to a control, the method comprising: obtaining a blood sample from a camelid immunized with the antigen; using the blood sample to obtain a nanobody cDNA library; identifying the sequence of each cDNA in the library; isolating nanobodies from the same or a second blood sample from the camelid immunized with the antigen; performing a functional selection step; digesting the nanobodies with trypsin or chymotrypsin to create a group of digestion products; performing a mass spectrometry analysis of the digestion products to obtain mass spectrometry data; selecting sequences identified in step c. that correlate with the mass spectrometry data; identifying sequences of CDR3 regions in the sequences from step g.; and excluding from the CDR3 region sequences from step h. those sequences having less than a calculated fragmentation coverage percentage; wherein the non-excluded sequences comprise a group having the reduced number of false positive CDR3 sequences. It should be understood that the method steps following the functional selection step can be performed separately on each different fraction or group created by the functional selection.

[0074] The “half-life” of an amino acid sequence, compound or polypeptide of the invention can generally be defined as the time taken for the serum concentration of the amino acid sequence, compound or polypeptide to be reduced by 50%, in vivo, for example due to degradation of the sequence or compound and/or clearance or sequestration of the sequence or compound by natural mechanisms. The in vivo half-life of a nanobody, amino acid sequence, compound or polypeptide of the invention can be determined in any manner known, such as by pharmacokinetic analysis. these, for example, Kenneth, A et al., Chemical Stability of Pharmaceuticals: A Handbook for Pharmacists; Peters et al., Pharmacokinete analysis: A Practical Approach (1996); “Pharmacokinetics”, M Gibaldi & D Perron, published by Marcel Dekker, 2nd Rev. edition (1982).

[0075] The term “identity” or “homology” shall be construed to mean the percentage of nucleotide bases or amino acid residues in the candidate sequence that are identical with the bases or residues of a corresponding sequence to which it is compared, after aligning the sequences and introducing gaps, if necessary to achieve the maximum percent identity for the entire sequence, and not considering any conservative substitutions as part of the sequence identity. A polynucleotide or polynucleotide region (or a polypeptide or polypeptide region) that has a certain percentage (for example, 80%, 85%, 90%, or 95%) of “sequence identity” to another sequence means that, when aligned, that percentage of bases (or amino acids) are the same in comparing the two sequences. In some embodiments, the identity or homology is determined over the entirety of the compared sequences, or in other words, the full length of the sequences are compared. This alignment and the percent homology or sequence identity can be determined using software programs known in the art. Such alignment can be provided using, for instance, the method of Needleman et al. (1970) J. Mol. Biol. 48: 443-453, implemented conveniently by computer programs such as the Align program (DNAstar, Inc.).

[0076] As used herein, the terms “nanobody”, “VHH”, “VHH antibody fragment” and “single domain antibody” are used indifferently and designate a variable domain of a single heavy chain of an antibody of the type found in Camelidae, which are without any light chains, such as those derived from Camelids as described in PCT Publication No. WO1994004678, which is incorporated by reference in its entirety.

[0077] As used herein, “operatively linked” refers to the arrangement of polypeptide segments within a single polypeptide chain, where the individual polypeptide segments can be, without limitation, a protein, fragments thereof, linking peptides, and/or signal peptides. The term operatively linked can refer to direct fusion of different individual polypeptides within the single polypeptides or fragments thereof where there are no intervening amino acids between the different segments as well as when the individual polypeptides are connected to one another via a “linker” that comprises one or more intervening amino acids. In some embodiments, the linker is between about 10 and about 40 amino acids. In some embodiments, the linker is between about 15 and about 35 amino acids. In some embodiments, the linker is about 25 amino acids. In some embodiments, the linker is about 31 amino acids. In some embodiments, the linker comprises SEQ ID NO:2115 (EGKSSGSGSESKSTGGGGSEGKSSGSGSESKST).

[0078] The term “neutralize” refers to a nanbody's ability to reduce infectivity of SARS CoV-2 or another coronavirus. It should be understood that “neutralizing” does not require a 100% neutralization and only requires a partial neutralization. In some embodiments, an about 30%, about 40%, about 50%, about 60%, about 70%, about 80%, or about 90% neutralization is obtained. In some embodiments, infectivity is reduced about 100%, about 90%, about 80%, about 70% or about 60%. “Infectivity” refers to the ability of a virus to bind to and enter a cell. As an example, a nanobody that reduces infectivity by a virus by 100% reduces the virus' entry into a cell by 100% as compared to a control. Accordingly, included herein are embodiments where the nanobody reduces infectivity of SARS CoV-2 or a coronavirus by about 100%, about 99%, about 98%, about 97%, about 96%, about 95%, about 94%, about 93%, about 92%, about 91%, about 90%, about 85%, about 80%, about 75%, about 70%, about 65%, about 60%, about 55%, or about 50% as compared to a control. In some embodiments, the concentration of nanobody required to achieve neutralization of SARS CoV-2 or a coronavirus by about 50% (e.g., an IC50) is less than 1 ng/1 ml.

[0079] The term “nucleic acid” as used herein means a polymer composed of nucleotides, e.g., deoxyribonucleotides (DNA) or ribonucleotides (RNA). The terms “ribonucleic acid” and “RNA” as used herein mean a polymer composed of ribonucleotides. The terms “deoxyribonucleic acid” and “DNA” as used herein mean a polymer composed of deoxyribonucleotides.

[0080] The terms “pharmaceutically effective amount”, “therapeutically effective amount” or “therapeutically effective dose” refer to the amount of a compound such as a SARS-CoV-2 or coronavirus neutralizing nanobody that will elicit the biological or medical response of a tissue, system, animal, or human that is being sought by the researcher, veterinarian, medical doctor or other clinician. In some embodiments, a desired response is a clinical improvement of, or reduction of an undesired symptom associated with, a SARS-CoV-2 or coronavirus infection. In some embodiments, a desired response is a prevention of a SARS-CoV-2 or coronavirus infection. In some instances, a desired biological or medical response is achieved following administration of multiple dosages of the composition to the subject over a period of days, weeks, or years. The terms “pharmaceutically effective amount”, “therapeutically effective amount” or “therapeutically effective dose” include that amount of a compound such as a SARS-CoV-2 or coronavirus neutralizing nanobody that, when administered, is sufficient to prevent development of, or alleviate to some extent, one or more of the symptoms of the condition or disorder being treated. The therapeutically effective amount will vary depending on the compound such as a selective bacterial β-glucuronidase inhibitor, the disorder or conditions and its severity, the route of administration, time of administration, rate of excretion, drug combination, judgment of the treating physician, dosage form, and the age, weight, general health, sex and/or diet of the subject to be treated. In the context of the present method, a pharmaceutically or therapeutically effective amount or dose of a SARS-CoV-2 or coronavirus neutralizing nanobody includes an amount that is sufficient to reduce one or more of shortness of breath, pneumonia, cough, fatigue, muscle or body aches, headache, loss of taste or smell, sore throat, nausea, vomiting, diarrhea, persistent pain or pressure in the chest, trouble breathing, and death caused by a SARS-CoV-2 or coronavirus infection.

[0081] The terms “polynucleotide” and “oligonucleotide” are used interchangeably, and refer to a polymeric form of nucleotides of any length, either deoxyribonucleotides or ribonucleotides, or analogs thereof. Polynucleotides may have any three-dimensional structure, and may perform any function, known or unknown. The following are non-limiting examples of polynucleotides: a gene or gene fragment, exons, introns, messenger RNA (mRNA), transfer RNA, ribosomal RNA, ribozymes, cDNA, recombinant polynucleotides, branched polynucleotides, plasmids, vectors, isolated DNA of any sequence, isolated RNA of any sequence, nucleic acid probes, and primers. A polynucleotide may comprise modified nucleotides, such as methylated nucleotides and nucleotide analogs. If present, modifications to the nucleotide structure may be imparted before or after assembly of the polymer. The sequence of nucleotides may be interrupted by non-nucleotide components. A polynucleotide may be further modified after polymerization, such as by conjugation with a labeling component. The term also refers to both double- and single-stranded molecules. Unless otherwise specified or required, any embodiment of this invention that is a polynucleotide encompasses both the double-stranded form and each of two complementary single-stranded forms known or predicted to make up the double-stranded form.

[0082] The term “polypeptide” is used in its broadest sense to refer to a compound of two or more subunit amino acids, amino acid analogs, or peptidomimetics. The subunits may be linked by peptide bonds. In another embodiment, the subunit may be linked by other bonds, e.g., ester, ether, etc. As used herein the term “amino acid” refers to either natural and/or unnatural or synthetic amino acids, including glycine and both the D or L optical isomers, and amino acid analogs and peptidomimetics. A peptide of three or more amino acids is commonly called an oligopeptide if the peptide chain is short. If the peptide chain is long, the peptide is commonly called a polypeptide or a protein.

[0083] “Recombinant” used in reference to a polypeptide refers herein to a combination of two or more polypeptides, which combination is not naturally occurring.

[0084] The term “required fragmentation coverage percentage” refers to a percentage obtained using the following formula:
[0085] f(x,Enzyme) is the function to calculate fragmentation coverage (%) of peptides digested by Enzyme
[0086] x is the length of CDR3 that the peptide mapped

$$\begin{matrix}f ( x , chymotrypsin ) = 0.0023 {x}^{2} - 0.0497 x + 0.7723 , x [ 5 , 30 ] \\ f ( x , t rypsin ) = 0.00006 {x}^{2} - 0.00444 x + 0.9194 , x [ 5 , 30 ]\end{matrix}$$

[0087] The terms “specific binding,” “specifically binds,” “selective binding,” and “selectively binds” mean that a nanobody exhibits appreciable affinity for a particular antigen or epitope and, generally, does not exhibit significant cross-reactivity with other non-spike protein receptor binding domain antigens and epitopes. Appreciable binding affinity includes binding with an affinity of at least 10⁶ M⁻¹, specifically at least 10⁷ M⁻¹, more specifically at least 10⁸ M⁻¹, yet more specifically at least 10⁹ M⁻¹, or even yet more specifically at least 10¹⁰ M⁻¹. A binding affinity can also be indicated as a range of affinities, for example, 10⁶ M⁻¹ to 10¹⁰ M⁻¹, specifically 10⁷ M⁻¹ to 10¹⁰ M⁻¹, more specifically 10⁸ M⁻¹ to 10¹⁰ M⁻¹. A nanobody that “does not exhibit significant cross reactivity” is one that will not appreciably bind to an undesirable entity (e.g., an undesirable proteinaceous entity such as a non-spike protein receptor binding domain). A nanobody specific for a particular epitope will, for example, not significantly cross react with other epitopes on the same protein or peptide. Specific binding can be determined according to any art-recognized means for determining Such binding. In some embodiments, specific binding is determined according to Scatchard analysis and/or competitive binding assays.

[0088] The term “subject” is defined herein to include animals such as mammals, including, but not limited to, primates (e.g., humans), cows, sheep, goats, horses, dogs, cats, rabbits, rats, mice and the like. In some embodiments, the subject is a human.

[0089] The terms “treat,” “treating,” “treatment,” and grammatical variations thereof as used herein, include partially or completely delaying, alleviating, mitigating or reducing the intensity of one or more attendant symptoms of a SARS-CoV-2, sarbecovirus or coronavirus infection and/or alleviating, mitigating or impeding one or more causes of a SARS-CoV-2, sarbecovirus or coronavirus infection. In some instances, the terms “treat”, “treating”, “treatment” and grammatical variations thereof, refer to reducing detectable SARS-CoV-2, sarbecovirus or coronavirus in the subject. In some instances, the terms “treat”, “treating”, “treatment” and grammatical variations thereof, refer to achieving a negative test result for SARS-CoV-2, sarbecovirus or coronavirus in the subject. In some instances, the terms “treat”, “treating”, “treatment” and grammatical variations thereof, refer to reducing SARS-CoV-2, sarbecovirus or coronavirus viral load in the subject. In some instances, the terms “treat”, “treating”, “treatment” and grammatical variations thereof, refer to reducing one or more of shortness of breath, pneumonia, cough, fatigue, muscle or body aches, headache, loss of taste or smell, sore throat, nausea, vomiting, diarrhea, persistent pain or pressure in the chest, trouble breathing, and death caused by a SARS-CoV-2, sarbecovirus or coronavirus infection.

### Compositions and Methods

[0090] Provided herein is the development and characterization of a large collection of diverse, high-affinity camelid Nbs. In some examples, the Nbs disclosed herein can target the S1-receptor binding domain (RBD) of a coronavirus spike protein or a coronavirus spike protein. In particular, the coronavirus Nbs (e.g., SARS-CoV-2 Nbs) described herein are capable of neutralizing coronavirus (e.g., SARS-CoV-2) infectivity in a cell culture system. Therefore, the coronavirus Nbs (e.g., SARS-CoV-2 Nbs) of the present invention are useful for treating or preventing a coronavirus infection (e.g., SARS-CoV-2, sarbecovirus or coronavirus infection), and included herein are methods of treating a coronavirus infection (e.g., SARS-CoV-2, sarbecovirus or coronavirus infection) in a subject comprising administering to the subject a therapeutically effective amount of a neutralizing nanobody described herein. Also included herein are methods of preventing a coronavirus infection (e.g., SARS-CoV-2, sarbecovirus or coronavirus infection) in a subject comprising administering to the subject a therapeutically effective amount of a neutralizing nanobody described herein.

[0091] The term “sarbecovirus” refers to a subgenus of genus betacoronavirus, family Coronaviridae. In some embodiments, the sarbecovirus is SARS-CoV. In some embodiments, the sarbecovirus is SARS-CoV-2. As used herein, a “sarbecovirus neutralizing nanobody” is a nanobody that can neutralize more than one member of the sarbecovirus subgenus.

[0092] The present invention includes nanobodies that comprise one or more complementarity determining regions 3 (CDR3), wherein the CDR3 comprises an amino acid sequence selected from the group consisting of SEQ ID NO: 1 through SEQ ID NO: 1057. In some embodiments, the nanobodies disclosed herein are sarbecovirus, SARS-CoV, and/or SARS-CoV-2 neutralizing nanobodies. In some embodiments, the coronavirus nanobody comprises a sequence that has about 80%, about 85%, about 90%, about 95%, about 96%, about 97%, about 98%, or about 99% homology with an amino acid sequence selected from the group consisting of SEQ ID NO: 1 through SEQ ID NO: 1057. In some embodiments, the nanobody comprises a sequence that has about 80%, about 85%, about 90%, about 95%, about 96%, about 97%, about 98%, or about 99% homology with an amino acid sequence selected from the group consisting of SEQ ID NO: 1058 through SEQ ID NO: 2114 and SEQ ID NO: 2117 through SEQ ID NO: 2119. In some embodiments, the nanobody comprises the sequence selected from the group consisting of SEQ ID NO: 1058 through SEQ ID NO: 2114 and SEQ ID NO: 2117 through SEQ ID NO: 2119.

[0093] In some embodiments, the nanobody comprises a sequence that has about 80%, about 85%, about 90%, about 95%, about 96%, about 97%, about 98%, or about 99% homology with an amino acid sequence selected from the group consisting of SEQ ID NO: 1058-1072, 1074, 1075, 1077, 1078, 1079, 1080, 1082, 1083, 1084, 1085, 1086, 1087, 1089, 1090, 1091, 1092, 1093, 1096, 1097, 1098, 1099, 1100, 1103, 1105, 1106, 1111, 1118, 1122, 1127, 1128, 1129, 1130, 1132, 1133, 1134, 1138, 1146, 1147, 1148, 1149, 1150, 1153, 1154, 1155, 1156, 1157, 1161, 1185, 1191, 1193, 1194, 1196, 1197, 1198, 1200, 1203, 1204, 1205, 1208, 1209, 1211, 1220, 1221, 1222, 1229, 1234, 1237, 1240, 1241, 1249, 1260, 1261, 1262, 1271, 1274, 1276, 1278, 1286, 1287, 1288, 1291, 1294, 2117, 2118, and 2119.

[0094] In some embodiments, the nanobody comprises a multimer (e.g., homodimer or homotrimer) of CDR3s, wherein the CDR3 comprises an amino acid sequence that has about 80%, about 85%, about 90%, about 95%, about 96%, about 97%, about 98%, or about 99% homology with an amino acid sequence selected from the group consisting of SEQ ID NO: 1 through SEQ ID NO: 1057. In some embodiments, the nanobody comprises a multimer (e.g., homodimer or homotrimer) of CDR3s, wherein the CDR3 comprises an amino acid sequence that has about 80%, about 85%, about 90%, about 95%, about 96%, about 97%, about 98%, or about 99% homology with an amino acid sequence selected from the group consisting of SEQ ID NO:1 through SEQ ID NO: 1057.

[0095] In some embodiments, the nanobody comprises a multimer (e.g., homodimer or homotrimer) of CDR3s, wherein the CDR3 comprises the amino acid sequence set forth in SEQ ID NO: 1 through SEQ ID NO: 1057. In some embodiments, the nanobody is a homotrimer comprising three copies of a CDR3, wherein the CDR3 comprises the one amino acid sequence comprises a sequence selected from the group consisting of SEQ ID NO: 1 through SEQ ID NO: 1057. In some embodiments, the nanobody is a homodimer comprising two copies of one CDR3, wherein the CDR3 comprises the one amino acid sequence comprises a sequence selected from the group consisting of SEQ ID NO: 1 through SEQ ID NO: 1057.

[0096] In some embodiments, the nanobody comprises a multimer (e.g., homodimer or homotrimer) of the amino acid sequence set forth in SEQ ID NO: 1058 through SEQ ID NO: 2114 and SEQ ID NO: 2117 through SEQ ID NO: 2119. In some embodiments, the nanobody is a homotrimer comprising three copies of one amino acid sequence, wherein the one amino acid sequence comprises a sequence selected from the group consisting of SEQ ID NO: 1058 through SEQ ID NO: 2114 and SEQ ID NO: 2117 through SEQ ID NO: 2119. In some embodiments, the nanobody is a homodimer comprising two copies of one amino acid sequence, wherein the one amino acid sequence comprises a sequence selected from the group consisting of SEQ ID NO: 1058 through SEQ ID NO: 2114 and SEQ ID NO: 2117 through SEQ ID NO: 2119.

[0097] In some embodiments, the nanobody comprises a multimer (e.g., homodimer or homotrimer) of the amino acid sequence set forth in SEQ ID NO: 1058-1072, 1074, 1075, 1077, 1078, 1079, 1080, 1082, 1083, 1084, 1085, 1086, 1087, 1089, 1090, 1091, 1092, 1093, 1096, 1097, 1098, 1099, 1100, 1103, 1105, 1106, 1111, 1118, 1122, 1127, 1128, 1129, 1130, 1132, 1133, 1134, 1138, 1146, 1147, 1148, 1149, 1150, 1153, 1154, 1155, 1156, 1157, 1161, 1185, 1191, 1193, 1194, 1196, 1197, 1198, 1200, 1203, 1204, 1205, 1208, 1209, 1211, 1220, 1221, 1222, 1229, 1234, 1237, 1240, 1241, 1249, 1260, 1261, 1262, 1271, 1274, 1276, 1278, 1286, 1287, 1288, 1291, 1294, 2117, 2118, and 2119.

[0098] In some embodiments, the nanobody is a homotrimer comprising three copies of one amino acid sequence, wherein the one amino acid sequence comprises a sequence selected from the group consisting of SEQ ID NO: 1058-1072, 1074, 1075, 1077, 1078, 1079, 1080, 1082, 1083, 1084, 1085, 1086, 1087, 1089, 1090, 1091, 1092, 1093, 1096, 1097, 1098, 1099, 1100, 1103, 1105, 1106, 1111, 1118, 1122, 1127, 1128, 1129, 1130, 1132, 1133, 1134, 1138, 1146, 1147, 1148, 1149, 1150, 1153, 1154, 1155, 1156, 1157, 1161, 1185, 1191, 1193, 1194, 1196, 1197, 1198, 1200, 1203, 1204, 1205, 1208, 1209, 1211, 1220, 1221, 1222, 1229, 1234, 1237, 1240, 1241, 1249, 1260, 1261, 1262, 1271, 1274, 1276, 1278, 1286, 1287, 1288, 1291, 1294, 2117, 2118, and 2119. In some embodiments, the nanobody is a homotrimer comprising three copies of one amino acid sequence, wherein the one amino acid sequence comprises the sequence of SEQ ID NO: 1147 or 1161.

[0099] In some embodiments, the nanobody is a homodimer comprising two copies of one amino acid sequence, wherein the one amino acid sequence comprises a sequence selected from the group consisting of SEQ ID NO: 1058-1072, 1074, 1075, 1077, 1078, 1079, 1080, 1082, 1083, 1084, 1085, 1086, 1087, 1089, 1090, 1091, 1092, 1093, 1096, 1097, 1098, 1099, 1100, 1103, 1105, 1106, 1111, 1118, 1122, 1127, 1128, 1129, 1130, 1132, 1133, 1134, 1138, 1146, 1147, 1148, 1149, 1150, 1153, 1154, 1155, 1156, 1157, 1161, 1185, 1191, 1193, 1194, 1196, 1197, 1198, 1200, 1203, 1204, 1205, 1208, 1209, 1211, 1220, 1221, 1222, 1229, 1234, 1237, 1240, 1241, 1249, 1260, 1261, 1262, 1271, 1274, 1276, 1278, 1286, 1287, 1288, 1291, 1294, 2117, 2118, and 2119.

[0100] In some embodiments, the nanobody is a heterotrimer comprising three different amino acid sequences, wherein each different amino acid sequence comprises a sequence selected from the group consisting of SEQ ID NO: 1 through SEQ ID NO: 1057. In some embodiments, the nanobody is a heterotrimer comprising three different amino acid sequences, wherein each different amino acid sequence comprises a sequence selected from the group consisting of SEQ ID NO: 1058 through SEQ ID NO: 2114 and SEQ ID NO: 2117 through SEQ ID NO: 2119.

[0101] In some embodiments, the nanobody is a heterotrimer comprising three different amino acid sequences, wherein each different amino acid sequence comprises a sequence selected from the group consisting of SEQ ID NO: 1058-1072, 1074, 1075, 1077, 1078, 1079, 1080, 1082, 1083, 1084, 1085, 1086, 1087, 1089, 1090, 1091, 1092, 1093, 1096, 1097, 1098, 1099, 1100, 1103, 1105, 1106, 1111, 1118, 1122, 1127, 1128, 1129, 1130, 1132, 1133, 1134, 1138, 1146, 1147, 1148, 1149, 1150, 1153, 1154, 1155, 1156, 1157, 1161, 1185, 1191, 1193, 1194, 1196, 1197, 1198, 1200, 1203, 1204, 1205, 1208, 1209, 1211, 1220, 1221, 1222, 1229, 1234, 1237, 1240, 1241, 1249, 1260, 1261, 1262, 1271, 1274, 1276, 1278, 1286, 1287, 1288, 1291, 1294, 2117, 2118, and 2119.

[0102] In some embodiments, the nanobody is a heterodimer comprising two different amino acid sequences, wherein each different amino acid sequence comprises a sequence selected from the group consisting of SEQ ID NO: 1 through SEQ ID NO: 1057. In some embodiments, the nanobody is a heterodimer comprising two different amino acid sequences, wherein each different amino acid sequence comprises a sequence selected from the group consisting of SEQ ID NO: 1058 through SEQ ID NO: 2114 and SEQ ID NO: 2117 through SEQ ID NO: 2119. In some embodiments, the nanobody is a heterodimer comprising two different amino acid sequences, wherein each different amino acid sequence comprises a sequence selected from the group consisting of SEQ ID NO: 1058-1072, 1074, 1075, 1077, 1078, 1079, 1080, 1082, 1083, 1084, 1085, 1086, 1087, 1089, 1090, 1091, 1092, 1093, 1096, 1097, 1098, 1099, 1100, 1103, 1105, 1106, 1111, 1118, 1122, 1127, 1128, 1129, 1130, 1132, 1133, 1134, 1138, 1146, 1147, 1148, 1149, 1150, 1153, 1154, 1155, 1156, 1157, 1161, 1185, 1191, 1193, 1194, 1196, 1197, 1198, 1200, 1203, 1204, 1205, 1208, 1209, 1211, 1220, 1221, 1222, 1229, 1234, 1237, 1240, 1241, 1249, 1260, 1261, 1262, 1271, 1274, 1276, 1278, 1286, 1287, 1288, 1291, 1294, 2117, 2118, and 2119. In some embodiments, the heterodimer comprises SEQ ID NO: 1147 and SEQ ID NO: 1161.

[0103] In some embodiments, the nanobody disclosed herein comprises a sequence of SEQ ID NO: 1075, SEQ ID NO: 1078, SEQ ID NO: 1084, SEQ ID NO: 1086, SEQ ID NO: 1122, SEQ ID NO: 1147, SEQ ID NO: 1161, SEQ ID NO: 1208, SEQ ID NO: 1211, SEQ ID NO: 1249, SEQ ID NO: 1276, SEQ ID NO: 2117 or SEQ ID NO: 2118. In some embodiments, the linker is between about 10 and about 40 amino acids. In some embodiments, the linker is between about 15 and about 35 amino acids. In some embodiments, the linker is about 25 amino acids. In some embodiments, the linker is about 31 amino acids. In some embodiments, the linker comprises SEQ ID NO: 2115 (EGKSSGSGSESKSTGGGGSEGKSSGSGSESKST) or a fragment thereof.

[0104] Accordingly, included herein is a homotrimer nanobody comprising three copies of one amino acid sequence, wherein the one amino acid sequence comprises a sequence selected from the group consisting of SEQ ID NO: 1 through SEQ ID NO: 1057 or a fragment thereof, and wherein the three copies are separated by linker sequences. Also included is a heterotrimer nanobody comprising three different amino acid sequences, wherein each different amino acid sequence comprises a sequence selected from the group consisting of SEQ ID NO: 1 through SEQ ID NO: 1057 or a fragment thereof, and wherein the different amino acid sequences are separated by linker sequences. Also included is a homodimer nanobody comprising two copies of one amino acid sequence, wherein the one amino acid sequence comprises a sequence selected from the group consisting of SEQ ID NO: 1 through SEQ ID NO: 1057 or a fragment thereof, and wherein the two copies are separated by linker sequences. Further included is a heterodimer nanobody comprising two different amino acid sequences, wherein each different amino acid sequence comprises a sequence selected from the group consisting of SEQ ID NO: 1 through SEQ ID NO: 1057 or a fragment thereof, and wherein the different amino acid sequences are separated by linker sequences.

[0105] In some embodiments, the sarbecovirus, SARS-CoV, and/or SARS-CoV-2 neutralizing nanobody disclosed herein is conjugated or linked to a nanobody or a nanobody fragment, that specifically binds to human serum albumin for the purpose of increasing the half-life of the sarbecovirus, SARS-CoV, and/or SARS-CoV-2 neutralizing nanobody.

[0106] With regard to the human serum albumin portion of the nanobody, “serum albumin” is a type of globular protein in vertebrate blood. Serum albumin is produced by the liver. “Human serum albumin” or “HSA” refers herein to a polypeptide that synthesizes and hydrolyzes cyclic adenosine 5′-diphosphate-ribose, and is encoded by the ALB gene. In some embodiments, the HSA polypeptide is that identified in one or more publicly available databases as follows: HGNC: 399, Entrez Gene: 213, Ensembl: ENSG00000163631, OMIM: 103600, UniProtKB: P02768. In some embodiments, the HSA polypeptide comprises the sequence of SEQ ID NO: 2124, or a polypeptide sequence having at or greater than about 80%, about 85%, about 90%, about 95%, or about 98% homology with SEQ ID NO: 2124, or a polypeptide comprising a portion of SEQ ID NO: 2124. The HSA polypeptide of SEQ ID NO: 2124 may represent an immature or pre-processed form of mature HSA, and accordingly, included herein are mature or processed portions of the HSA polypeptide in SEQ ID NO: 2124.

[0107] In some embodiments, the human serum albumin-binding nanobody comprises a sequence selected from SEQ ID NO: 2125-2127. In some embodiments, the human serum albumin-binding nanobody used herein are those as described in PCT Publication No. WO2021/178804, which is incorporated by reference in its entirety.

[0108] In some embodiments, the sarbecovirus, SARS-CoV, and/or SARS-CoV-2 neutralizing nanobody reduces infectivity of a sarbecovirus, SARS-CoV, and/or SARS-CoV-2 by about 100%, about 90%, about 80%, about 70%, about 60%, or about 50%. In some embodiments the sarbecovirus, SARS-CoV, and/or SARS-CoV-2 Nb reduces infectivity of a sarbecovirus, SARS-CoV, and/or SARS-CoV-2 by about 100%, about 99%, about 98%, about 97%, about 96%, about 95%, about 94%, about 93%, about 92%, about 91%, about 90%, about 85%, about 80%, about 75%, about 70%, about 65%, about 60%, about 55%, or about 50%. Reduced infectivity can be determined using any method, including a cell culture system used to determine viral neutralization. In some embodiments, the concentration of nanobody required to achieve a reduced infectivity of a sarbecovirus, SARS-CoV, and/or SARS-CoV-2 by about 50% (e.g., an IC50) is less than 1 ng/1 ml.

[0109] In some embodiments, the sarbecovirus, SARS-CoV, and/or SARS-CoV-2 neutralizing nanobody binds specifically to the concave, hACE2 binding sites. In some embodiments, the binding affinity is a femtomolar binding.

[0110] As noted above, also included herein are methods of treating and/or preventing a sarbecovirus, SARS-CoV, and/or SARS-CoV-2 infection in a subject comprising administering to the subject a therapeutically effective amount of a sarbecovirus, SARS-CoV, and/or SARS-CoV-2 neutralizing nanobody disclosed herein. In some embodiments of the methods, the sarbecovirus, SARS-CoV, and/or SARS-CoV-2 neutralizing nanobody comprises an amino acid sequence selected from the group consisting of SEQ ID NO: 1 through SEQ ID NO: 1057. In some embodiments of the methods, the sarbecovirus, SARS-CoV, and/or SARS-CoV-2 neutralizing nanobody comprises an amino acid sequence selected from the group consisting of SEQ ID NO: 1058 through SEQ ID NO: 2114 and SEQ ID NO: 2117 through SEQ ID NO: 2119.

[0111] In some embodiments, the nanobodies disclosed herein comprise paratopes that specifically bind to epitopes on a viral protein (e.g., a SARS-CoV-2 spike protein). In some embodiments, the nanobodies specifically bind to a SARS-CoV-2 spike protein (SEQ ID NO: 2116). In some embodiments, the nanobodies specifically bind to the receptor binding domain (RBD) of a SARS-CoV-2 spike protein, wherein the RBD comprises an amino acid sequence of residue numbers 334-527 of SEQ ID NO: 2116. The term “epitope”, also known as antigenic determinant, refers to the part of an antigen that is recognized by the immune system (e.g., antibodies). The part of an antibody that binds to the epitope is referred herein as a “paratope”. Antibody-antigen interactions occur between the sequence regions on the antibody (paratope) and the antigen (epitope) at the binding interface. Consequently, paratopes and epitopes can manifest in two ways: (1) as a continuous stretch of interacting residues or (2) discontinuously, separated by one or more non-interacting residues (gaps) due to protein folding.

[0112] In some embodiments, the nanobody disclosed herein comprises an amino acid sequence having the same amino acids residues at positions 30, 31, 32, 33, 47, 48, 49, 50, 51, 52, 53, 54, 55, 56, 57, 58, 59, 60, 61, 62, 63, 105, 106, 107, 108, 109, 110 and 114 relative to SEQ ID NO: 1211, and wherein the nanobody specifically binds to amino acids at positions 453, 455, 456, 472, 473, 475, 476, 477, 483, 484, 485, 486, 487, 488, 489, 490, 491, 492 and 493 of SEQ ID NO: 2120.

[0113] In some embodiments, the nanobody disclosed herein comprises an amino acid sequence having the same amino acids residues at positions 1, 2, 3, 25, 26, 27, 28, 29, 30, 31, 32, 33, 52, 53, 54, 74, 100, 101, 102, 103, 104, 105, 106, 111, 113 and 114 relative to SEQ ID NO: 1276, and wherein the nanobody specifically binds to amino acids at positions 364, 365, 366, 367, 369, 370, 371, 372, 374, 375, 376, 377, 378, 379, 380, 381, 382, 383, 384, 385, 386, 387, 388, 389, 407, 408, 409, 410, 411, 412, 413, 414, 429, 431, 432, 433, 435 and 526 of SEQ ID NO: 2120.

[0114] In some embodiments, the nanobody disclosed herein an amino acid sequence having the same amino acids residues at positions 1, 2, 28, 29, 30, 31, 32, 33, 57, 59, 98, 99, 100, 101, 102, 103, 104, 108, 109, 110, and 111 relative to SEQ ID NO: 2118, and wherein the nanobody specifically binds to amino acids at positions 368, 369, 370, 371, 374, 376, 377, 378, 379, 380, 381, 382, 383, 384, 385, 408, 410, 411, 412, 413, 414, 415, 426, 427, 428, 429 and 430 of SEQ ID NO: 2120.

[0115] In some embodiments, the nanobody disclosed herein comprises an amino acid sequence having the same amino acids residues at positions 1, 2, 26, 30, 31, 32, 52, 56, 98, 99, 100, 101, 102, 103, 104, 107, 108, 109 and 110 relative to SEQ ID NO: 1078, and wherein the nanobody specifically binds to amino acids at positions 369, 372, 377, 378, 379, 380, 381, 382, 383, 384, 385, 386, 411, 412, 413, 414, 415, 427, 428, and 429 of SEQ ID NO: 2120.

[0116] In some embodiments, the nanobody disclosed herein comprises an amino acid sequence having the same amino acids residues at positions 47, 52, 53, 54, 56, 57, 58, 59, 60, 61, 62, 65, 99, 100, 101, 102, 103, 104, 105, 106, 107, 108, 109, 110, 111, 112, 113 and 114 relative to SEQ ID NO: 1084, and wherein the nanobody specifically binds to amino acids at positions 368, 369, 370, 371, 372, 373, 374, 375, 376, 377, 378, 379, 380, 381, 382, 383, 384, 385, 386, 404, 405, 407, 408, 411, 412, 432, 433, 434, 435, 436, 437, 503, 504, 508 and 510 of SEQ ID NO: 2120. In some embodiments, the nanobody disclosed herein comprises an amino acid sequence having the same amino acids residues at positions 1, 2, 28, 31, 32, 99, 100, 101, 102, 103, 104, 106, 107, 110, 111, 112, 113, 114, 115, 116 and 117 relative to SEQ ID NO: 1075, and wherein the nanobody specifically binds to amino acids at positions 375, 376, 377, 378, 379, 380, 381, 382, 383, 384, 385, 386, 387, 408, 410, 411, 412, 413, 414, 415, 416, 426, 427, 428, 429, 430, 431 and 432 of SEQ ID NO: 2120.

[0117] In some embodiments, the nanobody disclosed herein comprises an amino acid sequence having the same amino acids residues at positions 2, 26, 28, 30, 31, 32, 52, 53, 54, 99, 100, 101, 102, 103, 104, 107, 112, 113, 114, 115, 116 and 117 relative to SEQ ID NO: 1147, and wherein the nanobody specifically binds to amino acids at positions 369, 370, 374, 375, 376, 377, 378, 379, 380, 381, 382, 383, 384, 385, 390, 408, 410, 411, 412, 413, 414, 426, 427, 428, 429 and 430 of SEQ ID NO: 2120.

[0118] In some embodiments, the nanobody disclosed herein comprises an amino acid sequence having the same amino acids residues at positions 31, 52, 56, 57, 100, 101, 102, 103, 104, 105, 106, 107, 108, 109, 110, 111, 112, 113, 114 and 115 relative to SEQ ID NO: 1122, and wherein the nanobody specifically binds to amino acids at positions 337, 340, 346, 348, 349, 351, 352, 353, 354, 355, 356, 357, 358, 359, 394, 396, 454, 464, 465, 466, 467, 468, 469 and 516 of SEQ ID NO: 2120.

[0119] In some embodiments, the nanobody disclosed herein comprises an amino acid sequence having the same amino acids residues at positions 33, 38, 43, 44, 46, 47, 50, 56, 57, 58, 59, 60, 61, 62, 63, 64, 65, 101, 102, 103, 104, 105 and 106 relative to SEQ ID NO: 1249, and wherein the nanobody specifically binds to amino acids at positions 357, 380, 381, 382, 393, 394, 396, 426, 427, 428, 429, 430, 462, 463, 516, 517, 518, 519, 520, 521, 522 and 523 of SEQ ID NO: 2120.

[0120] In some embodiments, the nanobody disclosed herein comprises an amino acid sequence having the same amino acids residues at positions 1, 2, 26, 27, 28, 30, 31, 32, 52, 53, 54, 97, 98, 99, 100, 101, 102, 103, 104, 105, 107, 108, 109, 110 and 111 relative to SEQ ID NO: 1161 and wherein the nanobody specifically binds to amino acids at positions 380, 381, 382, 386, 387, 389, 390, 391, 392, 393, 426, 428, 429, 430, 431, 462, 464, 513, 514, 515, 516, 517, 518, 519, 520, 521, 522, 52 and 525 of SEQ ID NO: 2120.

[0121] In some embodiments, the nanobody disclosed herein comprises an amino acid sequence having the same amino acids residues at positions 27, 28, 29, 30, 31, 32, 33, 50, 52, 53, 54, 55, 56, 58, 60, 100, 101, 102, 103, 104, 105, 106, 107, 110 and 111 relative to SEQ ID NO: 2117 and wherein the nanobody specifically binds to amino acids at positions 355, 380, 381, 382, 383, 385, 386, 387, 388, 389, 390, 391, 392, 393, 394, 396, 426, 427, 428, 429, 430, 462, 463, 464, 465, 515, 516, 517, 518, 519, 520, 521 and 522 of SEQ ID NO: 2120.

[0122] In some embodiments, the nanobody disclosed herein comprises an amino acid sequence having the same amino acids residues at positions 46, 48, 115, 116, 117, 118, 119, 120, 121, 122, 123, 124 and 125 relative to SEQ ID NO: 1208 and wherein the nanobody specifically binds to amino acids at positions 355, 396, 426, 428, 429, 430, 431, 463, 464, 514, 515, 516, 517, 518, 519 and 520 of SEQ ID NO: 2120.

[0123] In some embodiments, the nanobody disclosed herein comprises an amino acid sequence having the same amino acids residues at positions 45, 47, 49, 57, 58, 59, 60, 61, 65, 99, 101, 103, 104, 105, 106, 107, 108, 109, 110, 111, 112, 113 and 115 relative to SEQ ID NO: 1086 and wherein the nanobody specifically binds to amino acids at positions 333, 334, 336, 359, 360, 361, 362, 363, 364, 365, 382, 384, 386, 387, 388, 389, 390, 391, 392, 393, 517, 518, 519, 520, 521, 522, 523, 524, 525 and 526 of SEQ ID NO: 2120.

[0124] It should be understood that in some embodiments, the SARS-CoV-2 nanobodies disclosed herein can cross-react with other coronavirus spike proteins. Accordingly, the invention includes treatment of coronaviruses other than SARS-CoV-2 with the nanobodies disclosed herein. Coronaviruses constitute the subfamily Orthocoronavirinae, in the family Coronaviridae, order Nidovirales, and realm Riboviria. They are enveloped viruses with a positive-sense single-stranded RNA genome and a nucleocapsid of helical symmetry. The genome size of coronaviruses ranges from approximately 27 to 34 kilobases. The structure of coronavirus generally consists of the following: spike protein, hemagglutinin-esterease dimer (HE), a membrane glycoprotein (M), an envelope protein (E) a nucleoclapid protein (N) and RNA. The coronavirus family comprises genera including, for example, alphacoronavius (e.g., Human coronavirus 229E, Human coronavirus NL63, Miniopterus bat coronavirus 1, Miniopterus bat coronavirus HKU8, Porcine epidemic diarrhea virus, Rhinolophus bat coronavirus HKU2, Scotophilus bat coronavirus 512), betacoronavirus (e.g., SARS-CoV-2, Betacoronavirus 1, Human coronavirus HKU1, Murine coronavirus, Pipistrellus bat coronavirus HKU5, Rousettus bat coronavirus HKU9, Severe acute respiratory syndrome-related coronavirus, Tylonycteris bat coronavirus HKU4, Middle East respiratory syndrome-related coronavirus (MERS), Human coronavirus OC43, Hedgehog coronavirus 1 (EriCoV)), gammacoronavirus (e.g., Beluga whale coronavirus SW1, Infectious bronchitis virus), and deltacoronavirus (e.g., Bulbul coronavirus HKU11, Porcine coronavirus HKU15). In some embodiments, the nanobodies disclosed herein can cross-react with other coronaviruses or other coronavirus spike proteins. In some embodiments, the nanobody cross reacts with Ratq13, pang17, SARS-CoV, WIVI, SHC014, Rs4081, RmYNo2, RF1, Yun11, BtKy72, BM4831. Accordingly, in some aspects, disclosed herein are nanobodies and uses thereof for treating and/or preventing an infection with a coronavirus. In some embodiments, the coronavirus is SARS-CoV. In some embodiments, the coronavirus is MERS-CoV.

[0125] In some embodiments, the nanobody is administered at a dose of about 0.01 mg/kg of body weight, about 0.05 mg/kg of body weight, about 0.1 mg/kg of body weight, about 0.15 mg/kg of body weight, about 0.2 mg/kg of body weight, about 0.25 mg/kg of body weight, about 0.3 mg/kg of body weight, about 0.35 mg/kg of body weight, about 0.4 mg/kg of body weight, about 0.45 mg/kg of body weight, about 0.5 mg/kg of body weight, about 0.55 mg/kg of body weight, about 0.6 mg/kg of body weight, about 0.65 mg/kg of body weight, about 0.7 mg/kg of body weight, about 0.75 mg/kg of body weight, about 0.8 mg/kg of body weight, about 0.85 mg/kg of body weight, about 0.9 mg/kg of body weight, about 0.95 mg/kg of body weight, about 1 mg/kg of body weight, about 2 mg/kg of body weight, about 3 mg/kg of body weight, about 4 mg/kg of body weight, about 5 mg/kg of body weight, about 6 mg/kg of body weight, about 7 mg/kg of body weight, about 8 mg/kg of body weight, about 9 mg/kg of body weight, about 10 mg/kg of body weight, or about 20 mg/kg of body weight. In some embodiments, the nanobody is administered at a dose of at least about 0.01 mg/kg of body weight (e.g., at least about 0.1 mg/kg of body weight, at least about 0.2 mg/kg of body weight, at least about 0.3 mg/kg of body weight, at least about 0.5 mg/kg of body weight, at least about 1.0 mg/kg of body weight, at least about 2 mg/kg of body weight, at least about 5 mg/kg of body weight, at least about 10 mg/kg of body weight, at least about 50 mg/kg of body weight, or at least about 100 mg/kg of body weight).

[0126] The disclosed methods can be employed 60, 59, 58, 57, 56, 55, 54, 53, 52, 51, 50, 49, 48, 47, 46, 45, 44, 43, 42, 41, 40, 39, 38, 37, 36, 35, 34, 33, 32, 31, 30, 29, 28, 27, 26, 25, 24, 23, 22, 21, 20, 19, 18, 17, 16, 15, 14, 13, 12, 11, 10, 9, 8, 7, 6, 5, 4, 3, 2, or 1 years; 12, 11, 10, 9, 8, 7, 6, 5, 4, 3, 2, or 1 months; 30, 29, 28, 27, 26, 25, 24, 23, 22, 21, 20, 19, 18, 17, 16, 15, 14, 13, 12, 11, 10, 9, 8, 7, 6, 5, 4, or 3 days; 60, 48, 36, 30, 24, 18, 15, 12, 10, 9, 8, 7, 6, 5, 4, 3, or 2 hours prior to the onset of a COVID-19 symptom; or 1, 2, 3, 4, 5, 6, 7, 8, 9, 10, 15, 20, 25, 30, 35, 40, 45, 50, 55, 60, 75, 90, 105, 120 minutes; 3, 4, 5, 6, 7, 8, 9, 10, 11, 12, 15, 18, 24, 30, 36, 48, 60 hours; 3, 4, 5, 6, 7, 8, 9, 10, 11, 12, 13, 14, 15, 16, 17, 18, 19, 20, 21, 22, 23, 24, 25, 26, 27, 28, 29, 30, 45, 60, 90 or more days; 4, 5, 6, 7, 8, 9, 10, 11, 12 or more months; 60, 59, 58, 57, 56, 55, 54, 53, 52, 51, 50, 49, 48, 47, 46, 45, 44, 43, 42, 41, 40, 39, 38, 37, 36, 35, 34, 33, 32, 31, 30, 29, 28, 27, 26, 25, 24, 23, 22, 21, 20, 19, 18, 17, 16, 15, 14, 13, 12, 11, 10, 9, 8, 7, 6, 5, 4, 3, 2, 1 years after the onset of symptoms of sarbecovirus, SARS-CoV, and/or SARS-CoV-2 infection (e.g., COVID-19 symptom). In some embodiments, the disclosed methods can be employed prior to or following the administering of another anti-SARS-CoV-2 agent.

[0127] A coronavirus or SARS-CoV-2 neutralizing nanobody described herein can be administered to the subject via any route including oral, topical, intravenous, subcutaneous, transcutaneous, transdermal, intramuscular, intra-joint, parenteral, intra-arteriole, intradermal, intraventricular, intracranial, intraperitoneal, intralesional, intranasal, rectal, vaginal, by inhalation or via an implanted reservoir. In some embodiments, the nanobody is administered intratracheally, intranasally, or through an inhalation route. In some embodiments, the coronavirus or SARS-CO-V2 neutralizing nanobody is in an aerosol form. The term “parenteral” includes subcutaneous, intravenous, intramuscular, intra-articular, intra-synovial, intrasternal, intrathecal, intrahepatic, intralesional, and intracranial injections or infusion techniques.

[0128] Dosing frequency for a coronavirus or SARS-CoV-2 neutralizing nanobody of any preceding aspects, includes, but is not limited to, at least once every year, once every two years, once every three years, once every four years, once every five years, once every six years, once every seven years, once every eight years, once every nine years, once every ten year, at least once every two months, once every three months, once every four months, once every five months, once every six months, once every seven months, once every eight months, once every nine months, once every ten months, once every eleven months, at least once every month, once every three weeks, once every two weeks, once a week, twice a week, three times a week, four times a week, five times a week, six times a week, daily, twice a day, three times a day, four times a day, or five times a day. Administration can also be continuous and adjusted to maintaining a level of the compound within any desired and specified range.

### EXAMPLES

### Example 1. Versatile, Multivalent Nanobody Cocktails Efficiently Neutralize SARS-CoV-2

[0129] A collection of diverse, soluble, stable, and high-affinity camelid Nbs that target the RBD were developed and characterized. The majority of the high-affinity RBD Nbs efficiently neutralize SARS-CoV-2. A subset has exceptional neutralization potency, comparable with, or better than the most potent human NAbs. Integrative structural approach was used and multiple epitopes of neutralizing Nbs were mapped. An atomic structure of an elite Nb of sub-ng/ml neutralization potency was determined in complex with the RBD. The results revealed that while highly potent neutralizing Nbs predominantly recognize the concave, hACE2 binding site, efficient neutralization can also be accomplished through other RBD epitopes. Finally, structural characterizations facilitated the bioengineering of multivalent Nbs into multi-epitope cocktails that achieved remarkable neutralization potencies of as low as 0.058 ng/ml (1.3 μM), which can be sufficient to prevent the generation of escape mutants

### Development of Highly Potent SARS-COV-2 Neutralizing Nbs

[0130] To produce high-quality SARS-CoV-2 neutralizing Nbs, a llama was immunized with the recombinant RBD protein expressed in human 293T cells. Compared to the pre-bleed, after affinity maturation, the post-immunized serum showed potent and specific serologic activities towards RBD binding with a titer of 1.75×10⁶ (FIG. 6A). The serum efficiently neutralized the pseudotyped SARS-CoV-2 at the half-maximal neutralization titer (NT50) of 310,000 (FIG. 6B), orders of magnitude higher than the convalescent sera obtained from recovered COVID-19 patients (Y. Cao et al., 2020; D. F. Robbiani et al., 2020). To further characterize these activities, the single-chain VHH antibodies were separated from the IgG antibodies from the serum. It was confirmed that the single-chain antibodies achieve specific, high-affinity binding to the RBD and possess sub-nM half-maximal inhibitory concentration (IC50=509 μM) against the pseudotyped virus (FIG. 6C).

[0131] Thousands of high-affinity VHH Nbs from the RBD-immunized llama serum were identified using a robust proteomic strategy (Y. Xiang et al., 2020) (FIG. 7a). This repertoire includes ˜350 unique CDR3s (complementarity-determining regions). For E. coli expression, 109 highly diverse Nb sequences were selected from the repertoire with unique CDR3s to cover various biophysical, structural, and different antiviral properties of the Nb repertoire. Ninety four Nbs were purified and tested for RBD binding by ELISA, from which 71 RBD-specific binders were confirmed (FIG. 7b-7c). Of these RBD-specific binders, 49 Nbs presented high solubility and high-affinity (ELISA IC50 below 30 nM, FIG. 1a), and were candidates for functional characterizations. A SARS-CoV-2-GFP pseudovirus neutralization assay was used to screen and characterize the antiviral activities of these high-affinity Nbs. The vast majority (94%) of the tested Nbs can neutralize the pseudotype virus below 3 μM (FIG. 1b). 90% of them blocked the pseudovirus below 500 nM. Only 20-40% of high-affinity RBD-specific mAbs identified from the patients' sera have been reported to possess comparable potency (Y. Cao et al., 2020; D. F. Robbiani et al., 2020). Over three quarters (76%) of the Nbs efficiently neutralized the pseudovirus below 50 nM, and 6% had neutralization activities below 0.5 nM. Finally, the potential of 14 to neutralize SARS-CoV-2 Munich strain was tested using the PRNT50 assay (W. B. Klimstra et al., 2020). All the Nbs reached 100% neutralization and neutralized the virus in a dose-dependent manner. The IC50s span from single-digit ng/ml to sub- ng/ml, with three unusual neutralizers of Nbs 89, 20, and 21 to be 2.0 ng/ml (0.129 nM), 1.6 ng/ml (0.102 nM), and 0.7 ng/ml (0.045 nM), respectively, based on the pseudovirus assay (FIG. 1c, FIG. 1e). Similar values (0.154 nM, 0.048 nM, and 0.021 nM, for Nbs 89, 20, and 21) were reproducibly obtained using SARS-CoV-2 (FIG. 1d, FIG. 1e). There was an excellent correlation between the two neutralization assays (R²=0.92, FIG. 8).

[0132] The binding kinetics of Nbs 89, 20, and 21 were measured by surface plasmon resonance (SPR) (FIG. 9a-9b). While Nbs 89 and 20 have an affinity of 108 pM and 10.4 pM, the best-neutralizing Nb21 did not show detectable dissociation from the RBD during 20 min SPR analysis. The femtomolar affinity of Nb21 potentially explains its unusual neutralization potency (FIG. 1f). The experiment determined thermostability of the top three neutralizing Nbs (89, 20, and 21) from the E. coli periplasmic preparations to be 65.9, 71.8, and 72.8° C., respectively (FIG. 9c). Finally, the on-shelf stability of Nb21 was tested, which remained soluble after˜6 weeks of storage at room temperature after purification and can well tolerate lyophilization. No multimeric forms or aggregations were detected by size-exclusion chromatography (SEC) (FIG. 9d). Together these results show that these neutralizing Nbs have the necessary physicochemical properties required for advanced therapeutic applications.

### Integrative Structural Characterization of the Nb Neutralization Epitopes

[0133] Epitope mapping based on atomic resolution structure determination by X-ray crystallography and Cryo-Electron Microscopy (CryoEM) is highly accurate but low-throughput. Here, information from SEC, cross-linking mass spectrometry (CXMS), shape and physicochemical complementarity, and statistics was integrated to determine structural models of RBD-Nb complexes (M. P. Rout, A. Sali, 2019; C. Yu et al., 2017; A. Leitner, M. Faini, F. 2016; B. T. Chait et. al., 2016). First, SEC experiments were performed to distinguish between Nbs that share the same epitope as Nb21 (thus complete with Nb 21 on an SEC) and those that bind to non-overlapping epitopes. Nbs 9, 16, 17, 20, 64, 82, 89, 99 and 107 competed with Nb21 for RBD binding based on SEC profiles (FIG. 2a, FIG. 10), indicating that their epitopes significantly overlap. In contrast, higher mass species (from early elution volumes) corresponding to the trimeric complexes composed of Nb21, RBD, and one of the Nbs (34, 36, 93, 105, and 95) were evident (FIGS. 2b, 11a-11h). Moreover, Nb105 competed with Nb34 and Nb95, which did not compete for RBD interaction, indicating the presence of two distinct and non-overlapping epitopes. Second, Nb-RBD complexes were cross-linked by DSS (disuccinimidyl suberate) and were identified on average, four intermolecular cross-links by MS for Nbs 20, 93, 34, 95, and 105. The cross-links were used to map the RBD epitopes derived from the SEC data (Methods). The cross-linking models identified five epitopes (I, II, III, IV, and V corresponding to Nbs 20, 93, 34, 95, and 105) (FIG. 2c). The models satisfied 90% of the cross-links with an average precision of 7.8 Å (FIG. 2d). The analysis confirmed the presence of a dominant Epitope I (e.g., epitopes of Nbs 20 and 21) overlapping with the hACE2 binding site. Epitope II also co-localized with the hACE2 binding site, while epitopes III-V did not (FIG. 2e). Epitope I Nbs had significantly shorter CDR3 (four amino acids shorter, p=0.005) than other epitope binders (FIG. 11i). Despite this, the vast majority of the selected Nbs potently inhibited the virus with an IC50 below 30 ng/ml (2 nM).

### Crystal Structure of RBD-Nb20 and MD Analysis of Nbs 20 and 21 for RBD Binding

[0134] To explore the molecular mechanisms that underlie the unusually potent neutralization activities of Epitope I Nbs, a crystal structure of the RBD-Nb20 complex at a resolution of 3.3 Å was determined by molecular replacement. Most of the residues in RBD (N334-G526) and the entire Nb20, particularly those at the protein interaction interface, are well resolved. There are two copies of RBD-Nb20 complexes in one asymmetric unit, which are almost identical with an RMSD of 0.277 Å over 287 Cα atoms. In the structure, all three CDRs of Nb20 interact with the RBD by binding to its large extended external loop with two short β-strands (FIG. 3a) (Q. H. Wang et al., 2020). E484 of RBD forms hydrogen bonding and ionic interactions with the side chains of R31 (CDR1) and Y104 (CDR3) of Nb20, while Q493 of RBD forms hydrogen bonds with the main chain carbonyl of A29 (CDR1) and the side chain of R97 (CDR3) of Nb20. These interactions constitute a major polar interaction network at the RBD and Nb20 interface. R31 of Nb20 also engages in a cation-π interaction with the side chain of F490 of the RBD (FIG. 3b). In addition, M55 from the CDR2 of Nb20 packs against residues L452, F490, and L492 of RBD to form hydrophobic interactions at the interface). Another small patch of hydrophobic interactions is formed among residues V483 of RBD and F45 and L59 from the framework β-sheet of Nb20 (FIG. 3c).

[0135] A small cavity with strong electron density at the RBD and Nb20 interface was observed surrounded by charged residues R31 and R97 of Nb20 and E484 of the RBD. A cacodylate group was modeled a from the protein crystallization conditions to fit the density, forming hydrogen bonds with two main chain amine groups of Nb20 and the RBD. Under physiological conditions, this cavity is occupied by ordered water molecules to mediate extensive hydrogen-bonding interactions with surrounding residues, contributing to the interactions between the RBD and Nb20. Similarly, in two crystal structures of the RBD bound to other Nbs (PDB IDs 6YZ5 and 7C8V0), there are also small molecules such as glycerol modeled at the RBD and Nb interfaces.

[0136] The binding mode of Nb20 to the RBD is distinct from all other reported SARS-CoV-2 neutralizing Nbs, which generally recognize similar epitopes in the RBD external loop region (T. Li et al., 2020; J. D. Walter et al., 2020; J. Huo et al., 2020) (FIG. 13). The extensive hydrophobic and polar interactions (FIGS. 3b-3c) between the RBD and Nb20 stem from the remarkable shape complementarity (FIG. 3d) between all the CDRs and the external RBD loop, leading to ultrahigh-affinity (˜10 pM). The structure of the best neutralizer Nb21 with RBD was further modeled based on the crystal structure (Methods). Only four residues vary between Nb20 and Nb21 (FIG. 14a), all of which are on CDRs. Two substitutions are at the RBD binding interface. S52 and M55 in the CDR2 of Nb20 are replaced by two asparagine residues N52 and N55 in Nb21. In this modeled structure, N52 forms a new H-bond with N450 of RBD (FIG. 14b). While N55 does not engage in additional interactions with RBD, it creates a salt bridge with the side chain of R31, which stabilizes the polar interaction network among R31 and Y104 of Nb21 and Q484 of RBD (FIG. 14b). All of those can contribute to a slower off-rate of Nb21 vs. Nb20 (FIGS. 2f, 9a) and stronger neutralization potency. Structural comparison of RBD-Nb20/21 and RBD-hACE2 (PDB 6LZG) (Q. H. Wang et al., 2020) clearly showed that the interfaces for Nb20/21 and hACE2 partially overlap (FIGS. 3d-3e). Notably, the CDR1 and CDR3 of Nb20/21 can severely clash with the first helix of hACE2, the primary binding site for RBD (FIG. 3f). This high-resolution structural study shows the exceptional binding affinities of epitope I Nbs that contribute to the sub-ng/ml neutralization capability.

[0137] To further explore the molecular mechanisms that underlie the exceptional neutralization activities of our Nbs, an X-ray crystallographic structure of the RBD-Nb20 complex at a resolution of 3.3 Å was determined in which all the residue side chains were resolved. This structure reveals that Nb20 employs an extensive network of hydrophobic and polar interactions to enable sub-nM, high-affinity RBD binding. Consistent to cross-linking, Nb20 interacts with the large cavity on the RBD formed by an extended loop (region 1: residues 432-438 and region 2: residues 464-484, FIG. 4). All three CDR loops are involved in binding. For example, A29 of CDR1 forms hydrophobic interactions with both Y436 and S481, and R31 (the last CDR1 residue) inserts itself into the deep pocket of the RBD cavity, creating a salt bridge with E471 and a cation-π interaction with F477. 5 out of 9 residues on the CDR2 contact the RBD loop by hydrophobic interactions (i.e., pairs of A 48-E 471, A 51-S481, S 52-N436, M55-L479, and N57-F477) facilitating the penetration of its loop into the RBD groove. Despite relatively short CDR3, at least three residues (R94, 196, and Y101) bind directly to the RBD cavity by H-bonds and hydrophobic interactions. Moreover, the interaction between Nb20 and the RBD is further stabilized by a conserved F47 on the FR2 and a residue X on the FR3 that pairs with V483 and XYZ. Together, Nb 20 employs a remarkable array of hydrophobic and polar interactions that enable perfection of shape complementarity between the convex Nb and the RBD groove.

### Potential Mechanisms of SARS-CoV-2 Neutralization by Nbs

[0138] To understand the outstanding antiviral efficacy of these Nbs better, RBD-Nb complexes were superimposed to different spike conformations based on cryoEM structures. It was found that three copies of Nb20/21 can simultaneously bind all three RBDs in their “down” conformations (PDB 6VXX) (A. C. Walls et al., 2020) that correspond to the inactive spike (FIG. 4b). This analysis indicates a mechanism by which Nbs 20 and 21 (Epitope I) lock RBDs in their down conformation with ultrahigh affinity. Combined with the steric interference with hACE2 binding in the RBD open conformation (FIG. 4a), these mechanisms can explain the exceptional neutralization potencies of Epitope I Nbs.

[0139] Other epitope-binders do not fit into this inactive conformation without steric clashes and appear to utilize different neutralization strategies (FIG. 4c). For example, Epitope II: Nb 93 co-localizes with hACE2 binding site and can bind the spike in the one RBD “up” conformation (FIG. 4d, PDB 6VSB) (D. Wrapp et al., 2020). It can neutralize the virus by blocking the hACE2 binding site. Epitope III and IV Nbs can only bind when two or three RBDs are at their “up” conformations (PDB 6XCN) (C. O. Barnes et al., 2020) where the epitopes are exposed. In the all RBDs “up” conformation, three copies of Nbs can directly interact with the trimeric spike. Through RBD binding, Epitope III: Nb34 can be accommodated on top of the trimer to lock the helices of S2 in the prefusion stage, preventing their large conformational changes for membrane fusion (FIG. 4e). When superimposed onto the all “up” conformation, Epitope IV: Nb95 is proximal to the rigid NTD of the trimer, presumably restricting the flexibility of the spike domains (FIG. 4f).

### Development Of Flexible, Multivalent Nb Formats for Highly Efficient Viral Neutralization

[0140] Epitope mapping enabled us to bioengineer a series of multivalent Nbs (FIG. 5a). Specifically, two sets of constructs that build upon the most potent Nbs were designed. The homotrimeric Nbs, in which a flexible linker sequence (either 31 or 25 amino acids, Methods) separates each monomer Nb (such as Nb21 or Nb20), were designed to increase the antiviral activities through avidity binding to the trimeric spike. The heterodimeric forms that conjugate two Nbs of unique, non-overlapping epitopes, through a flexible linker of 12 residues.

[0141] A variety of constructs were synthesized and their neutralization potency was tested. Up to ˜30 fold improvement was found for the homotrimeric constructs of Nb21₃ (IC50=1.3 pM) and Nb20₃ (IC50=3 pM) compared to the respective monomeric form by the pseudovirus luciferase assay (FIG. 5b, FIG. 5d). Similar results were obtained from the SARS-CoV-2 PRNT (FIGS. 5c, 5d, 15a). The improvements are greater than these values indicate, as the measured values can reflect the assay's lower detection limits. For the heterodimeric constructs, up to a 4-fold increase of potency (i.e., Nb21-Nb34) was observed. Importantly, the multivalent constructs retained outstanding physicochemical properties of the monomeric Nbs, including high solubility, yield, and thermostability (FIG. 15). They remained fully active after standard lyophilization and nebulization (Methods, FIGS. 16b-16e), indicating the outstanding stability and flexibility of administration. The majority of the RBD mutations observed in GISAID (Y. L. Shu et al., 2017) are very low in frequency (<0.0025). Therefore, the probability of mutational escape with a cocktail consisting of 2-3 Nbs covering different epitopes is extremely low (FIG. 5e) (J. Hansen et al., 2020).

[0142] The development of effective, safe, and inexpensive vaccines and therapeutics are critical to end the COVID-19 pandemic. Here, in vivo (camelid) antibody affinity maturation followed by advanced proteomics (Y. Xiang et al., 2020) enabled rapid identification of a large repertoire of diverse, high-affinity RBD Nbs for the neutralization of SARS-CoV-2. The majority of the high-affinity Nbs efficiently neutralize SARS-CoV-2 and some elite Nbs in their monomeric forms can inhibit the viral infection at single-digit to sub-ng/ml concentrations.

[0143] Multiple neutralization epitopes were identified through the integration of biophysics, structural proteomics, modeling, and X-ray crystallography. This study shows the mechanisms by which Nbs target the RBD with femtomolar affinity to achieve remarkable neutralization potency of a low-passage, clinical isolate of SARS-CoV-2. Structural analysis revealed that the hACE2 binding site correlates with immunogenicity and neutralization. While the most potent Nbs inhibit the virus by high-affinity binding to the hACE2 binding site, other neutralization mechanisms through non-hACE2 epitopes were also observed.

[0144] A preprint reported an extensively bioengineered, homotrimeric Nb construct reaching antiviral activity comparable to our single monomeric Nb20 (M. Schoof et al., 2020). Here, the present study has developed a collection of novel multivalent Nb constructs with outstanding stability and neutralization potency at double-digit pg/ml. This represents the most potent biotherapeutics for SARS-CoV-2 available to date. The use of multivalent, multi-epitope Nb cocktails can prevent virus escape (A. Baum et al., 2020; Y. Bar-On et al., 2018; M. Marovich et al., 2020). Flexible and efficient administration, such as direct inhalation can be used to improve antiviral drug efficacy and minimize the dose, cost, and potential toxicity for clinical applications. The high sequence similarity between Nbs and IgGs can restrain the immunogenicity (I. Jovcevska et. al., 2020). For intravenous drug delivery, it is possible to fuse our antiviral Nbs with the albumin-Nb constructs (Z. Shen et al., 2020) t already developed to improve the in vivo half-lives. These Nbs can also be applied as rapid point-of-care diagnostics due to the high stability, specificity, and low cost of manufacturing. These high-quality Nb agents contributes to curbing the current pandemic.

### Methods

[0145] Camelid immunization and proteomic identification of high-affinity RBD-Nbs. A male Llama “Wally” was immunized with an RBD-Fc fusion protein (Acro Biosystems, Cat #SPD-c5255) at a primary dose of 0.2 mg (with complete Freund's adjuvant), followed by three consecutive boosts of 0.1 mg every 2 weeks. ˜480 ml blood from the animal was collected 10 days after the final boost. All the above procedures were performed by the Capralogics, Inc. following the IACUC protocol. ˜1×10⁹ peripheral mononuclear cells were isolated using Ficoll gradient (Sigma). The mRNA was purified from the mononuclear cells using an RNeasy kit (Qiagen) and was reverse-transcribed into cDNA by the Maxima™ H Minus cDNA Synthesis kit (Thermo). The V_{H}H genes were PCR amplified, and the P5 and P7 adapters were added with the index before sequencing (Y. Xiang et al., 2020). Next-generation sequencing (NGS) of the V_{H}H repertoire was performed by Illumina MiSeq with the 300 bp paired-end model in the UPMC Genome Center. For proteomic analysis of RBD-specific Nbs, plasma was first purified from the immunized blood by the Ficoll gradient (Sigma). V_{H}H antibodies were then isolated from the plasma by a two-step purification protocol using protein G and protein A sepharose beads (Marvelgent) (P. C. Fridy et al., 2014). RBD-specific V_{H}H antibodies were affinity isolated and subsequentially eluted by either increasing stringency of high pH buffer or salt. All the eluted V_{H}Hs were neutralized and dialyzed into 1×DPBS before the quantitative proteomics analysis. RBD-specific V_{H}H antibodies were reduced, alkylated and in-solution digested using either trypsin or chymotrypsin (Y. Xiang et al., 2020). After proteolysis, the peptide mixtures were desalted by self-packed stage-tips or Sep-Pak C18 columns (Waters) and analyzed with a nano-LC 1200 that is coupled online with a Q Exactive™ HF-X Hybrid Quadrupole Orbitrap™ mass spectrometer (Thermo Fisher). Proteomic analysis was performed as previously described and by using the Augur Llama—a dedicated software that we developed to facilitate reliable identification, label-free quantification, and classification of high-affinity Nbs (25). This analysis led to thousands of RBD-specific, high-affinity Nb candidates that belong to ˜350 unique CDR3 families. From these, we selected 109 Nb sequences with unique CDR3s for DNA synthesis and characterizations.

[0146] Nb DNA synthesis and cloning. The monomeric Nb genes and the homotrimeric Nbs 20 and 21 with the (GGGGS, (SEQ ID NO: 175))₅ linkers were codon-optimized and synthesized (Synbio). All the Nb DNA sequences were cloned into a pET-21b(+) vector using EcoRI and HindIII restriction sites. The monomeric Nbs 20, 21, and 89, as well as the homotrimeric Nbs 20 and 21, were also cloned into a pET-22b(+) vector at the BamHI and XhoI sites for periplasmic purification.

[0147] The Nb genes were codon-optimized for expression in E. coli and in vitro synthesized (Synbio). Different synthesized Nb genes were cloned into a pET-21b (+) vector at BamHI and XhoI restriction sites or pET-22b (+) vector. To produce the heterodimeric Nb formats, DNA fragments of Nbs (such as Nb34), were amplified from the pET21(a+) Nb constructs while new XhoI/HindIII restriction sites plus (GGGGS, (SEQ ID NO: 175))₂ linker sequence were introduced. The fragments were then inserted into pET21(a+)_Nb21 at the XhoI and HindIII restriction sites to produce a heterodimer form [Nb21-(GGGGS, (SEQ ID NO: 175))₂-Nb]. The homotrimeric constructs were either directly synthesized or produced in house by recombinant DNA methods. The DNA fragment of the linker sequence EGKSSGSGSESKSTGGGGSEGKSSGSGSESKST (SEQ ID NO: 2115) was annealed and extended using the following two oligos: CCGCTCGAGTGCTGCGGCCGCGGTGCTTTTGCTTTCGCCGCTACCGCTGCTTTTACCT TCGCTGCCACC (SEQ ID NO: 2122), and CCCAAGCTTGAAGGTAAAAGCAGCGGTAGCGGCGAAAGCAAAAGCACCGGTGGCG GTGGCAGCGAAGGT (SEQ ID NO: 2123) (Integrated DNA Technologies).

[0148] The digested XhoI/HindIII linker fragment was then inserted into the corresponding sites on pET21(a+)_Nb21 or pET21(a+)_Nb20. To shuffle the second Nb21 or 20 to this Nb_linker vector, we amplified Nb21 or 20 from pET21(a+) and introduced the XhoI/NotI restriction sites. After digestion, the XhoI/NotI Nb fragment was inserted into the Nb_linker vector to produce a homodimer construct. The new Nb constructs were subsequently sequence verified.

[0149] Expression and purification of proteins. Nb DNA constructs were transformed into BL21(DE3) cells and plated on Agar with 50 μg/ml ampicillin at 37° C. overnight. Cells were cultured in an LB broth to reach an O.D. of ˜0.5-0.6 before IPTG (0.5 mM) induction at 16° C. overnight. Cells were then harvested, sonicated, and lysed on ice with a lysis buffer (1×PBS, 150 mM NaCl, 0.2% TX-100 with protease inhibitor). After cell lysis, protein extracts were collected by centrifugation at 15,000×g for 10 mins and the his-tagged Nbs were purified by Cobalt resin and natively eluted by imidazole buffer (Thermo). Eluted Nbs were subsequently dialyzed in a dialysis buffer (e.g., 1×DPBS, pH 7.4). For the periplasmic preparation of Nbs (Nbs 20, 21, and 89 and the homotrimeric constructs), cell pellets were resuspended in the TES buffer (0.1 M Tris-HCl, pH 8.0; 0.25 mM EDTA, pH 8.0; 0.25 M Sucrose) and incubated on ice for 30 min. The supernatants were collected by centrifugation and subsequently dialyzed to DPBS. The resulting Nbs were then purified by Cobalt resin as described above.

[0150] The RBD (residues 319-541) of the SARS-CoV-2 S protein was expressed as a secreted protein in Spodoptera frugiperda Sf9 cells (Expression Systems) using the Bac-to-bac baculovirus method (Invitrogen). To facilitate protein purification, a FLAG-tag and an 8×His-tag were fused to its N terminus, and a tobacco etch virus (TEV) protease cleavage site was introduced between the His-tag and RBD. Cells were infected with baculovirus and incubated at 27° C. for 60 h before harvesting. The conditioned media was added with 20 mM Tris pH 7.5 and incubated at RT for 1 h in the presence of 1 mM NiSO4 and 5 mM CaCl₂. The supernatant was collected by centrifugation at 25,000 g for 30 min and then incubated with Nickel-NTA agarose resin (Clontech) overnight at 4° C. After washing with buffer containing 20 mM Hepes pH 7.5, 200 mM NaCl, and 50 mM imidazole, the RBD protein was eluted with the same buffer containing 400 mM Imidazole. Eluted protein was treated by TEV protease overnight to remove extra tags and further purified by size exclusion chromatography using the Superdex 75 column (Fisher) with a buffer containing 20 mM HEPES pH 7.5 and 150 mM NaCl. To obtain RBD and Nb20 complex, purified RBD was mixed with purified Nb20 in a molar ratio of 1:1.5 and then incubated on ice for 2 hours. The complex was further purified using the Superdex 75 column with a buffer containing 20 mM Hepes pH 7.5 and 150 mM NaCl. Purified RBD-Nb20 complex was concentrated to 10-15 mg/ml for crystallization.

[0151] ELISA (Enzyme-linked immunosorbent assay). Indirect ELISA was carried out to measure the relative affinities of Nbs. RBD was coated onto a 96-well ELISA plate (R&D system) at two ng/well in coating buffer (15 mM sodium carbonate, 35 mM sodium bicarbonate, pH 9.6) overnight at 4° C. and was blocked with a blocking buffer (DPBS, 0.05% Tween 20, 5% milk) at room temperature for 2 hrs. Nbs were serially 10× diluted in the blocking buffer, starting from 1 μM to 0.1 pM, and 100 μl of each concentration was incubated with RBD-coated plates for 2 hrs. HRP-conjugated secondary antibodies against T7-tag (Thermo) were diluted 1:7500 and incubated with the well for 1 hr at room temperature. After PBST (DPBS, 0.05% Tween 20) washes, the samples were further incubated under dark with freshly prepared w3,3′,5,5′-Tetramethylbenzidine (TMB) substrate for 10 mins to develop the signals. After the STOP solution (R&D system), the plates were read at multiple wavelengths (the optical density at 550 nm wavelength subtracted from the density at 450 nm) on a plate reader (Multiskan GO, Thermo Fisher). A non-binder was defined if any of the following two criteria were met: i) The ELISA signal was under detected at one μM concentration. ii) The ELISA signal could only be detected at a concentration of 1 μM and was under detected at 0.1 μM concentration. The raw data was processed by Prism 7 (GraphPad) to fit into a 4PL curve and to calculate log IC50.

[0152] Competitive ELISA with hACE2. The COVID-19 spike-ACE2 binding assay kit was purchased from RayBiotech (Cat #CoV-SACE2-1). A 96-well plate was pre-coated with recombinant RBD. Nbs were 10-fold diluted (from 1 μM to 1 μM) in the assay buffer containing a saturating amount of hACE2 and then incubated with the plate at room temperature for 2.5 hrs. The plate was washed by the washing buffer to remove the unbound hACE2. Goat anti-hACE2 antibodies were incubated with the plate for 1 hr at room temperature. HRP-conjugated anti-goat IgG was added to the plate and incubated for an hour. TMB solution was added to react with the HRP conjugates for 0.5 hr. The reaction was then stopped by the Stop Solution. The signal corresponding to the amount of the bound hACE2 was measured by a plate reader at 450 nm. The resulting data were analyzed by Prism 7 (GraphPad) and plotted.

[0153] Pseudotyped SARS-CoV-2 neutralization assay. The 293T-hsACE2 stable cell line (Cat #C-HA101, Lot #TA060720C) and the pseudotyped SARS-CoV-2 (Wuhan-Hu-1 strain) particles with GFP (Cat #RVP-701G, Lot #CG-113A) or luciferase (Cat #RVP-701L, Lot #CL109A, and CL-114A) reporters were purchased from the Integral Molecular. The neutralization assay was carried out according to the manufacturers' protocols. In brief, 10-fold serially diluted Nbs were incubated with the pseudotyped SARS-CoV-2-GFP for 1 hr at 37° C. for screening, while 3- or 5-fold serially diluted Nbs/immunized serum/immunized VHH mixture was incubated with the pseudotyped SARS-CoV-2-luciferase for accurate measurements. At least eight concentrations were tested for each Nb. Pseudovirus in culture media without Nbs was used as a negative control. 100 μl of the mixtures were then incubated with 100 μl 293T-hsACE2 cells at 2.5×10e5 cells/ml in the 96-well plates. The infection took ˜72 hrs at 37° C. with 5% CO2. The GFP signals (ex488/em530) were read using the Tecan Spark 20M with auto-optimal settings, while the luciferase signal was measured using the Renilla-Glo luciferase assay system (Promega, Cat #E2720) with the luminometer at 1 ms integration time. The obtained relative fluorescent/luminescence signals (RFU/RLU) from the negative control wells were normalized and used to calculate the neutralization percentage at each concentration. For SARSCoV-2-GFP screening, the 49 tested Nbs were divided into 6 groups based on their lowest tested concentration of 100% neutralization. For SARS-CoV-2-luciferase, data was processed by Prism7 (GraphPad) to fit into a 4PL curve and to calculate the log IC50 (half-maximal inhibitory concentration).

[0154] SARS-CoV-2 Munich plaque reduction neutralization test (PRNT). Nbs were diluted in a 2- or 3-fold series in Opti-MEM (Thermo). Each Nb dilution (110 μl) was mixed with 110 μl of SARS-CoV-2 (Munich strain) containing 100 plaque-forming units (p.f.u.) of the virus in Opti-MEM. The serum-virus mixes (220 μl total) were incubated at 37° C. for 1 h, after which they were added dropwise onto confluent Vero E6 cell (ATCC® CRL-1586™) monolayers in the six-well plates. After incubation at 37° C., 5% (v/v) CO2 for 1 h, 2 ml of 0.1% (w/v) immunodiffusion agarose (MP Biomedicals) in Dulbecco's modified eagle medium (DMEM) (Thermo) with 10% (v/v) FBS and 1× pen-strep was added to each well. The cells were incubated at 37° C., 5% CO2 for 72 hrs. The agarose overlay was removed and the cell monolayer was fixed with 1 ml/well formaldehyde (Fisher) for 20 min at room temperature. Fixative was discarded and 1 ml/well of 1% (w/v) crystal violet in 10% (v/v) methanol was added. Plates were incubated at room temperature for 20 min and rinsed thoroughly with water. Plaques were then enumerated and the 50% plaque reduction neutralization titer (PRNT50) was calculated. A validated SARS-CoV-2 antibody-negative human serum control, a validated NIBSC SARS-CoV-2 plasma control, was obtained from the National Institute for Biological Standards and Control, UK) and an uninfected cells control were also performed to ensure that virus neutralization by antibodies was specific.

[0155] Thermostability analysis of Nbs. Nb thermostabilities were measured by differential scanning fluorimetry (DSF). To prepare DSF samples, Nbs were mixed with SYPRO orange dye (Invitrogen) in PBS to reach a final concentration of 2.5-15 μM. The samples were analyzed in triplicate using a 7900HT Fast Real-Time PCR System (Applied Biosystems) as previously described {cite Allen's paper}. The melting point was then calculated by the first derivatives method {Niesen, 2007}.

[0156] Surface plasmon resonance (SPR). Surface plasmon resonance (SPR, Biacore 3000 system, GE Healthcare) was used to measure Nb affinities. Briefly, recombinant RBD was immobilized to the flow channels of an activated CM5 sensor-chip. RBD was diluted to 10 μg/ml in 10 mM sodium acetate, pH 4.5, and injected into the SPR system at 5 μl/min for 420 s. The surface was then blocked by 1 M ethanolamine-HCl (pH 8.5). For each Nb analyte, a series of dilution (spanning ˜1,000-fold concentration range) was injected in duplicate, with HBS-EP+ running buffer (GE-Healthcare) at a flow rate of 20-30 μl/min for 120-180 s, followed by a dissociation time of 10-20 mins. Between each injection, the sensor chip surface was regenerated twice with a low pH buffer containing 10 mM glycine-HCl (pH 1.5-2.5) at a flow rate of 40-50 μl/min for 30 s-1 min. Binding sensorgrams for each Nb were processed and analyzed using BIAevaluation by fitting with 1:1 Langmuir model.

[0157] Phylogenetic tree analysis and sequence logo. Sequences were first aligned and numbered according to Martin's numbering scheme by ANARCI (J. Dunbar et al., 2016). The phylogenetic tree was constructed from aligned sequences by Molecular Evolutionary Genetics Analysis (MEGA) (S. Kumar et al., 2018) using the Maximum Likelihood method. The sequence logo was plotted from aligned sequences by logomaker (A. Tareen et al., 2020).

[0158] Epitope screening by size exclusion chromatography (SEC). Recombinant RBD and Nb proteins were mixed at a ratio of 1:1 (w:w) and incubated at 4° C. for 1 hr. The complexes were analyzed by the SEC (Superdex75, GE Healthcare) at a low rate of 0.4 ml/min for 1 hr using a running buffer of 20 mM HEPES, 150 mM NaCl, pH 7.5. Protein signals were detected by ultraviolet light absorbance at 280 nm.

[0159] Clustering and phylogenetic tree analysis. A phylogenetic tree was generated by Clustal Omega {Sievers, 2014} with the input of unique NbHSA CDR3 sequences and the adjacent framework sequences (i.e., YYCAA (SEQ ID NO: 179) to the N-terminus and WGQG (SEQ ID NO: 180) to the C-terminus of CDR3s) to help alignments. The data was plotted by ITol (Interactive Tree of Life) {Letunic, 2007}. Isoelectric points and hydrophobicities of the CDR3s were calculated using the BioPython library. The sequence logo was plotted using WebLogo {Crooks, 2004}.

[0160] Chemical cross-linking and mass spectrometry (CXMS). Recombinant Nbs were first pre-incubated with the trypsin resin for approximately 2-5 mins to remove the N terminal T7 tag, which is highly reactive to the crosslinker. Nb was incubated with RBD in PBS at 4° C. for 1 hr to allow the formation of the complex. The reconstituted complexes were then cross-linked with 2 mM disuccinimidyl suberate (DSS, ThermoFisher Scientific) for 25 min at 25° C. with gentle agitation. The reaction was then quenched with 50 mM ammonium bicarbonate (ABC) for 10 min at room temperature. After protein reduction and alkylation, the cross-linked samples were separated by a 4-12% SDS-PAGE gel (NuPAGE, Thermo Fisher). The regions corresponding to the monomeric, cross-linked species (˜45-50 kDa) were sliced and digested in-gel with trypsin and Lys-C, or chymotrypsin {Shi, 2014; Shi, 2015; Xiang, 2020}. After efficient proteolysis, the cross-link peptide mixtures were desalted and analyzed with a nano-LC 1200 (Thermo Fisher) coupled to a Q Exactive™ HF-X Hybrid Quadrupole-Orbitrap™ mass spectrometer (Thermo Fisher). The cross-linked peptides were loaded onto a Picochip column (C18, 3 μm particle size, 300 Å pore size, 50 μm×10.5 cm; New Objective) and eluted using a 60 min LC gradient: 5% B-8% B, 0-5 min; 8% B-32% B, 5-45 min; 32% B-100% B, 45-49 min; 100% B, 49-54 min; 100% B-5% B, 54 min-54 min 10 sec; 5% B, 54 min 10 sec-60 min 10 sec; mobile phase A consisted of 0.1% formic acid (FA), and mobile phase B consisted of 0.1% FA in 80% acetonitrile. The QE HF-X instrument was operated in the data-dependent mode. The top 8 most abundant ions (with the mass range of 380 to 2,000 and the charge state of +3 to +7) were fragmented by high-energy collisional dissociation (normalized HCD energy 27). The target resolution was 120,000 for MS and 15,000 for MS/MS analyses. The quadrupole isolation window was 1.8 Th and the maximum injection time for MS/MS was set at 120 ms. After the MS analysis, the data was searched by pLink for the identification of cross-linked peptides. The mass accuracy was specified as 10 and 20 p.p.m. for MS and MS/MS, respectively. Other search parameters included cysteine carbamidomethylation as a fixed modification and methionine oxidation as a variable modification. A maximum of three trypsin missed-cleavage sites was allowed. Initial search results were obtained using the default 5% false discovery rate, estimated using a target-decoy search strategy. The crosslink spectra were manually checked as previously described {Shi, 2014; Shi, 2015; Xiang, 2020}.

[0161] Integrative structural modeling. Structural models for Nbs were obtained using a multi-template comparative modeling protocol of MODELLER {Sali, 1993}. Next, the CDR3 loop {Fiser, 2003} was refined and the top 5 scoring loop conformations were selected for the downstream docking in addition to 5 models from comparative modeling. Each Nb model was then docked to the RBD structure (PDB 61zg) by an antibody-antigen docking protocol of PatchDock software that focuses the search to the CDRs and optimizes CXMS-based distance restraints satisfaction {Schneidman-Duhovny, 2012; Schneidman-Duhovny, 2020}. A restraint was considered satisfied if the Ca-Ca distance between the cross-linked residues was within 28 Å for DSS cross-linkers. The models were then re-scored by a statistical potential SOAP {Dong, 2013}. The antigen interface residues (distance <6 Å from Nb atoms) among the top 10 scoring models, according to the SOAP score, were used to determine the epitopes. The convergence was measured as the average RMSD among the ten top-scoring models.

[0162] Crystallization, data collection, and structure determination of RBD-Nb20 complex. Crystallization trials were performed with the Crystal Gryphon robot (Art Robbins). The RBD-Nb20 complex was crystallized using the sitting-drop vapor diffusion method at 17° C. The crystals were obtained in conditions containing 100 mM sodium cacodylate pH 6.5 and 1 M sodium citrate. For data collection, the crystals were transferred to the reservoir solution supplemented with 20% glycerol before freezing in liquid nitrogen. X-ray diffraction data were collected at the Advanced Photon Source (APS) beamline 23IDB of GM/CA with a 10 μm diameter microbeam. The data were processed using HKL2000 (A. J. McCoy et al., 2007). Diffraction data from six crystals were merged to obtain a complete dataset with a resolution of 3.3 Å.

[0163] The structure was determined by the molecular replacement method in Phaser (P. D. Adams et al., 2010) using the crystal structures of RBD (PDB 6LZG) and an Nb (VHH-72, PDB 6WAQ) as search models. The initial model was refined in Phenix (P. Emsley et al., 2004) and adjusted in COOT (C. J. Williams et al., 2018). The model quality was checked by MolProbity (T. D. Goddard et al., 2018).

[0164] Nb21 comparative modeling was done using the Nb20 structure as a template in MODELLER. All structure visualization figures were prepared using UCSF ChimeraX (F. H. Niesen et al., 2007).

[0165] Nb stability test. For the stability test, Nb was eluted and collected in the SEC running buffer (20 mM HEPES, 150 mM NaCl, pH 7.5) and then concentrated to 1 ml (1 mg/ml). 0.5 ml of the concentrated Nb was lyophilized by snap freezing in liquid nitrogen before dried in a speed-vac. ddH2O was then used to reconstitute the Nb. The other 0.5 ml was aerosolized by using a portable mesh atomizer nebulizer (MayLuck). No obvious dead volume was observed. The aerosols were collected in a microcentrifuge tube. SEC analysis and pseudovirus neutralization assays were performed as described above.

[0166] Size exclusion chromatography (SEC). The recombinant RBD and selected Nbs were mixed at a molar ratio of 1:2 and incubated at 4° C. for 1 hr in the SEC buffer. The complexes were analyzed by SEC (Superdex75, GE LifeSciences). Protein signals were detected by ultraviolet light absorbance at 280 nm.

[0167] Data collection and structure determination. Crystals were collected and were frozen in liquid nitrogen. Data collection was performed at beamline 23-ID of GM/CA@APS at the Advanced Photon Source. Microbeams of 10 or 20 μM diameter were used to acquire all diffraction data.

### Example 2. Methods of Identifying SARS-CoV-2 Neutralizing Nanobodies and Computer Implemented Methods

[0168] The SARS-CoV-2 neutralizing nanobodies disclosed herein were developed using our integrative proteomic platform for in-depth discovery, classification, and high-throughput structural characterization of antigen-engaged Nb repertoires. This platform comprises a method of identifying a group of complementarity determining region (CDR)3 region SARS-CoV-2 nanobody amino acid sequences (CDR3 sequences) wherein a reduced number of the CDR3 sequences are false positives as compared to a control, the method comprising:
[0169] a. obtaining a blood sample from a camelid immunized with a SARS-CoV-2 antigen;
[0170] b. using the blood sample to obtain a nanobody cDNA library;
[0171] c. identifying the sequence of each cDNA in the library;
[0172] d. isolating nanobodies from the same or a second blood sample from the camelid immunized with the antigen;
[0173] e. digesting the nanobodies with trypsin or chymotrypsin to create a group of digestion products;
[0174] f. performing a mass spectrometry analysis of the digestion products to obtain mass spectrometry data;
[0175] g. selecting sequences identified in step c. that correlate with the mass spectrometry data;
[0176] h. identifying sequences of CDR3 regions in the sequences from step g.; and
[0177] i. selecting from the CDR3 region sequences of step h. those sequences having equal to or more than a required fragmentation coverage percentage; wherein the selected sequences comprise a group having the reduced number of false positive CDR3 sequences.

[0178] In some embodiments, the method further comprises creating a CDR3 peptide having a sequence identified in step i. The CDR3 peptide can comprises a sequence selected from the group consisting of SEQ ID NO:82 through SEQ ID NO:152. In some embodiments, the method further comprises creating a SARS-CoV-2 neutralizing nanobody comprising a CDR3 region having a sequence identified in step i. The SARS-CoV-2 neutralizing nanobody can comprise a sequence selected from the group consisting of SEQ ID NO:1 through SEQ ID NO:81.

[0179] Also included herein are computer-implemented methods, comprising:
[0180] a. receiving a SARS-CoV-2 nanobody peptide sequence;
[0181] b. identifying a plurality of complementarity-determining region (CDR) regions of the nanobody peptide sequence, the CDR regions including CDR3 regions;
[0182] c. applying a fragmentation filter to discard one or more false positive CDR3 regions of the nanobody peptide sequence;
[0183] d. quantifying an abundance of one or more non-discarded CDR3 regions of the nanobody peptide sequence; and
[0184] e. inferring an antigen affinity based on the quantified abundance of the one or more non-discarded CDR3 regions of the nanobody peptide sequence.

[0185] It should be appreciated that the logical operations described herein with respect to the various figures may be implemented (1) as a sequence of computer implemented acts or program modules (i.e., software) running on a computing device (e.g., the computing device described in FIG. 22), (2) as interconnected machine logic circuits or circuit modules (i.e., hardware) within the computing device and/or (3) a combination of software and hardware of the computing device. Thus, the logical operations discussed herein are not limited to any specific combination of hardware and software. The implementation is a matter of choice dependent on the performance and other requirements of the computing device. Accordingly, the logical operations described herein are referred to variously as operations, structural devices, acts, or modules. These operations, structural devices, acts and modules may be implemented in software, in firmware, in special purpose digital logic, and any combination thereof. It should also be appreciated that more or fewer operations may be performed than shown in the figures and described herein. These operations may also be performed in a different order than those described herein.

[0186] Referring to FIG. 22, an example computing device 500 upon which the methods described herein may be implemented is illustrated. It should be understood that the example computing device 500 is only one example of a suitable computing environment upon which the methods described herein may be implemented. Optionally, the computing device 500 can be a well-known computing system including, but not limited to, personal computers, servers, handheld or laptop devices, multiprocessor systems, microprocessor-based systems, network personal computers (PCs), minicomputers, mainframe computers, embedded systems, and/or distributed computing environments including a plurality of any of the above systems or devices. Distributed computing environments enable remote computing devices, which are connected to a communication network or other data transmission medium, to perform various tasks. In the distributed computing environment, the program modules, applications, and other data may be stored on local and/or remote computer storage media.

[0187] In its most basic configuration, computing device 500 typically includes at least one processing unit 506 and system memory 504. Depending on the exact configuration and type of computing device, system memory 504 may be volatile (such as random access memory (RAM)), non-volatile (such as read-only memory (ROM), flash memory, etc.), or some combination of the two. This most basic configuration is illustrated in FIG. 22 by dashed line 502. The processing unit 506 may be a standard programmable processor that performs arithmetic and logic operations necessary for operation of the computing device 500. The computing device 500 may also include a bus or other communication mechanism for communicating information among various components of the computing device 500.

[0188] Computing device 500 may have additional features/functionality. For example, computing device 500 may include additional storage such as removable storage 508 and non-removable storage 510 including, but not limited to, magnetic or optical disks or tapes. Computing device 500 may also contain network connection(s) 516 that allow the device to communicate with other devices. Computing device 500 may also have input device(s) 514 such as a keyboard, mouse, touch screen, etc. Output device(s) 512 such as a display, speakers, printer, etc. may also be included. The additional devices may be connected to the bus in order to facilitate communication of data among the components of the computing device 500. All these devices are well known in the art and need not be discussed at length here.

[0189] The processing unit 506 may be configured to execute program code encoded in tangible, computer-readable media. Tangible, computer-readable media refers to any media that is capable of providing data that causes the computing device 500 (i.e., a machine) to operate in a particular fashion. Various computer-readable media may be utilized to provide instructions to the processing unit 506 for execution. Example tangible, computer-readable media may include, but is not limited to, volatile media, non-volatile media, removable media and non-removable media implemented in any method or technology for storage of information such as computer readable instructions, data structures, program modules or other data. System memory 504, removable storage 508, and non-removable storage 510 are all examples of tangible, computer storage media. Example tangible, computer-readable recording media include, but are not limited to, an integrated circuit (e.g., field-programmable gate array or application-specific IC), a hard disk, an optical disk, a magneto-optical disk, a floppy disk, a magnetic tape, a holographic storage medium, a solid-state device, RAM, ROM, electrically erasable program read-only memory (EEPROM), flash memory or other memory technology, CD-ROM, digital versatile disks (DVD) or other optical storage, magnetic cassettes, magnetic tape, magnetic disk storage or other magnetic storage devices.

[0190] In an example implementation, the processing unit 506 may execute program code stored in the system memory 504. For example, the bus may carry data to the system memory 504, from which the processing unit 506 receives and executes instructions. The data received by the system memory 504 may optionally be stored on the removable storage 508 or the non-removable storage 510 before or after execution by the processing unit 506.

[0191] It should be understood that the various techniques described herein may be implemented in connection with hardware or software or, where appropriate, with a combination thereof. Thus, the methods and apparatuses of the presently disclosed subject matter, or certain aspects or portions thereof, may take the form of program code (i.e., instructions) embodied in tangible media, such as floppy diskettes, CD-ROMs, hard drives, or any other machine-readable storage medium wherein, when the program code is loaded into and executed by a machine, such as a computing device, the machine becomes an apparatus for practicing the presently disclosed subject matter. In the case of program code execution on programmable computers, the computing device generally includes a processor, a storage medium readable by the processor (including volatile and non-volatile memory and/or storage elements), at least one input device, and at least one output device. One or more programs may implement or utilize the processes described in connection with the presently disclosed subject matter, e.g., through the use of an application programming interface (API), reusable controls, or the like. Such programs may be implemented in a high level procedural or object-oriented programming language to communicate with a computer system. However, the program(s) can be implemented in assembly or machine language, if desired. In any case, the language may be a compiled or interpreted language and it may be combined with hardware implementations.

### Example 3. Super-Immunity by Broadly Protective Sarbecovirus Nanobodies

### Methods and Materials

### Purification of Recombinant Sarbecovirus RBDs and SARS-CoV-2 Spike

[0192] The mammalian expression vectors encoding the RBDs of RaTG13-CoV (GenBank QHR63300; S protein residues 319-541), SHCO14-CoV (GenBank KC881005; residues 307-524), Rs4081-CoV (GenBank KY417143; residues 310-515), pangolin17-CoV (GenBank QIA48632; residues 317-539), RmYNO2-CoV (GSAID EPI_ISL_412977; residues 298-503), Rf1-CoV (GenBank DQ412042; residues 310-515), W1V1-CoV (GenBank KF367457; residues 307-528), Yun11-CoV (GenBank JX993988; residues 310-515), BM-4831-CoV (GenBank NC014470; residues 310-530), BtkY72-CoV (GenBank KY352407; residues 309-530) with an N-terminal Mu phosphatase signal peptide and C-terminal His-tag were a kind gift from Pamela J. Bjorkman's lab, Caltech. Plasmids of the RBDs for the following sarbecovirus strains were synthesized from Synbio Technologies in a similar way: SARS-CoV-2 (GenBank MN985325.1; S protein residues 319-539), SARS-CoV (GenBank AAP13441.1; residues 318-510), Rs7327-CoV (GenBank KY417151.1; residues 319-518), Rs4092-CoV (GenBank KY417145.1; residues 314-496), YN2013-CoV (GenBank KJ473816.1; residues 314-496), ZC45-CoV (GenBank MG772933.1; residues 327-509), HKU3-1-CoV (GenBank DQ022305.2; residues 322-505), Shaanxi2011-CoV (GenBank JX993987.1; residues 321-502) and Rp3-CoV (GenBank DQ071615.1; residues 322-504). The cDNA encoding SARS-CoV-2 spike HexaPro (S) was obtained from Addgene (Cat #154754). To express the proteins, Expi293F cells were transiently transfected with the plasmid using the ExpiFectamine 293 kit (Thermo, Cat #A14635). After 24 hrs of transfection, enhancers were added to further boost protein expression. Cell culture was harvested 5-6 days after transfection and the supernatant was collected by high-speed centrifugation at 21,000×g for 30 min. The secreted proteins in the supernatant were purified using His-Cobalt resin (Thermo). Eluted proteins were then concentrated and further purified by size-exclusion chromatography using a Superose 6 10/300 (for S) or Superdex 75 column (for RBDs, Cytiva) in a buffer composed of 20 mM Hepes pH 7.5 and 150 mM NaCl. SARS-CoV-2 RBD variants are obtained from the Acro Biosystems.

Camelid Immunization and Proteomic Identification of psNbs

[0193] A Llama “Wally” was previously immunized as described {reference} and the collection bleed is referred to as the first bleed. Three weeks after the blood collection, the same llama was immunized again by four consecutive boosts every 2 weeks. Blood was collected 10 days after the final boost and is referred to as 2^{nd} bleed or booster. All the above procedures were performed by Capralogics, Inc. following the IACUC protocol. Next-generation sequencing (NGS) of the V_{H}H repertoire of the 2^{nd} bleed was performed by Illumina MiSeq in the UPMC Genome Center as described.

[0194] Plasma was first purified from the two immunized bleeds by the Ficoll gradient (Sigma). Polyclonal V_{H}Hs were then isolated from the plasma by a two-step purification using protein G and protein A sepharose beads (Marvelgent). RBD_{SARS-CoV-2}, RBD_{SARS-CoV}, RBD_{RmYNO2} and RBD_{BM-4831} are coupled to the resin as affinity handles to isolate each RBD-specific V_{H}Hs. After proteolysis by trypsin and chymotrypsin, peptide mixtures were desalted and analyzed with a nano-LC 1200 that is coupled online with a Q Exactive™ HF-X Hybrid Quadrupole Orbitrap™ mass spectrometer. Proteomic analysis was performed as previously described and AugurLlama was used to facilitate reliable identification, label-free quantification, and classification of high-affinity pan-sarbecovirus Nbs.

### Nb DNA Synthesis and Cloning

[0195] The monomeric Nb genes were codon-optimized and synthesized (Synbio). All the Nb DNA sequences were cloned into a pET-21b(+) vector using EcoRI and HindIII restriction sites. The monomeric Nbs 5P-118 and 5P-132 were also cloned into a pET-22b(+) vector at the BamHI and XhoI sites for periplasmic expression. To produce a heterodimeric Nb 132-118, the DNA fragment of the monomeric Nb 5P-118 was first PCR amplified from the pET-21b(+) vector to introduce a linker sequence and two restriction sites of XhoI and HindIII that facilitate cloning (Primer1: cccAAGCTTggtggtggtggtagtggtggtggtggtagtggtggtggtggtagtCAaGTTCAACTGGTTGAATCT G (SEQ ID NO: 2128);

[0196] Primer2: ccgCTCGAGTGCGGCCGCcagtttGCTACTAACGGTAACTT) (SEQ ID NO: 2129). The PCR fragment was then inserted into the 5P-132 pET-21b(+) vector at the same restriction sites to produce the heterodimer 5P-132-(GGGGS)₃-5P-118.

### Purification of Nbs

[0197] Nb DNA constructs were transformed into BL21(DE3) cells and plated on Agar with 50 μg/ml ampicillin at 37° C. overnight. Cells were cultured in an LB broth to reach an O.D. of ˜0.5-0.6 before IPTG (0.5-1 mM) induction at 16/20° C. overnight. Cells were then harvested, sonicated, and lysed on ice with a lysis buffer (1×PBS, 150 mM NaCl, 0.2% TX-100 with protease inhibitor). After cell lysis, protein extracts were collected by centrifugation at 21,000×g for 10 mins and the his-tagged Nbs were purified by the Cobalt resin (Thermo) and natively eluted with a buffer containing 150 mM imidazole buffer. Eluted Nbs were subsequently dialyzed in a dialysis buffer (e.g., 1×DPBS, pH 7.4 or SEC buffer).

[0198] For the periplasmic preparation of Nbs (5P-118 and 5P-132), cell pellets were resuspended in the TES buffer (0.1 M Tris-HCl, pH 8.0; 0.25 mM EDTA, pH 8.0; 0.25 M Sucrose) and incubated on ice for 30 min. The supernatants were collected by centrifugation and subsequently dialyzed to DPBS. The resulting Nbs were then purified by Cobalt resin as described above.

### ELISA (Enzyme-Linked Immunosorbent Assay)

[0199] Indirect ELISA was carried out to evaluate the camelid immune responses of the total single-chain only antibody (VHH) to an RBD and to quantify the relative affinities of psNbs. The 96-well ELISA plate (R&D system) was coated with the RBD protein or the HEK-293T cell lysate at an amount of approximately 3-5 ng per well in a coating buffer (15 mM sodium carbonate, 35 mM sodium bicarbonate, pH 9.6) overnight at 4° C., with subsequent blockage with a blocking buffer (DPBS, 0.05% Tween 20, 5% milk) at room temperature for 2 hours. To test the immune response, the total VHH was serially 5-fold diluted in the blocking buffer and then incubated with the RBD-coated wells at room temperature for 2 hours. HRP-conjugated secondary antibodies against llama Fc were diluted 1:75,00 in the blocking buffer and incubated with each well for an additional 1 hour at room temperature. For the initial screening of Nb binding against 4 RBDs, scramble Nbs that do not bind the RBDs were used for negative controls. Nbs were serially 10-fold diluted from 1 μM to 1 nM in the blocking buffer. For the Nb affinity measurements against 24 RBDs, Nbs were serially 4-fold diluted. Nb dilutions were incubated for 2 hours at room temperature. HRP-conjugated secondary antibodies against the T7-tag were diluted at 1:5,000 or 1:75,00 in the blocking buffer and incubated for 1 hour at room temperature. Three washes with 1×PBST (DPBS v/v, 0.05% Tween 20) were carried out to remove nonspecific absorbances between each incubation. After the final wash, the samples were further incubated under dark with freshly prepared w3,3′,5,5′-Tetramethylbenzidine (TMB) substrate for 10 mins at room temperature to develop the signals. After the STOP solution (R&D system), the plates were read at multiple wavelengths (450 nm and 550 nm) on a plate reader (Multiskan GO, Thermo Fisher). The raw data was processed by Prism 9 (GraphPad) to fit into a 4PL curve and to calculate log IC50.

Competitive ELISA with Recombinant hACE2

[0200] A 96-well plate was pre-coated with recombinant spike-6P at 2 μg/ml at 4° C. overnight. Nbs were 5-fold diluted (from 0.2/1/5 μM to 12.8/64/320 pM) in the assay buffer with a final amount of 50 ng biotinylated hACE2 at each concentration and then incubated with the plate at room temperature for 2 hrs. The plate was washed by the washing buffer to remove the unbound hACE2. 1:6000 diluted Pierce™ High Sensitivity NeutrAvidin™-HRP antibodies (Thermo Fisher cat #31030) were incubated with the plate for 1 hour at room temperature. TMB solution was added to react with the HRP conjugates for 10 minutes. The reaction was then stopped by the Stop Solution. The signal corresponding to the amount of the bound hACE2 was measured by a plate reader at 450 nm and 550 nm. The wells without Nbs were used as control to calculate the percentage of hACE2 signal. The resulting data were analyzed by Prism 9 (GraphPad) and plotted.

psNb Epitope Analysis by Competitive Size Exclusion Chromatography (SEC)

[0201] Analytical size exclusion chromatography was performed with a superdex 75 increase GL column (column volume: 24 mL, Cytiva) on a Shimadzu HPLC system equipped with a multi-wavelength UV detector at a flow rate of 0.3 mL/min. The column was connected and placed in a column oven set to 15° C., and the SEC running buffer was 10 mM HEPES pH 7.1, 150 mM NaCl. A reference SEC profile for RBD with class I (Nb21), class II (Nb105 or 5p34) and class III (Nb36) was performed after column equilibration. Subsequently, three separate runs with RBD and specified psNb were performed after mixing with (i) class I and class II, (ii) class II and class III and (iii) class I and class III nanobodies. A supershift of the peak, at the same or to the left of the RBD and three Nbs peak in the reference profile, in run (i) but not run (ii) and (iii) sorts a psNb into class III. Similarly, psNb with a supershift in run (ii) but not run (i) and (iii) belongs to class I, and a supershift in run (iii) but not run (i) and (ii) indicates a class II epitope binder. When supershifts were observed in all three runs, the psNb was sorted into a new class.

### Nb Affinity Measurement by SPR

[0202] Surface plasmon resonance (SPR, Biacore 3000 system, GE Healthcare) was used to measure Nb affinities. RBD proteins were_immobilized on the activated CM5 sensor-chip in pH 4.0 10 mM sodium acetate buffer. The surface of the sensor chip was blocked by 1 M Tris-HCl (pH 8.5). For each Nb analyte, a series of concentration dilutions was injected in HBS-EP running buffer (GE-Healthcare), at a flow rate of 20 μl/min for 180s, followed by a dissociation time of 15 mins. Between each injection, the sensor chip surface was regenerated with the low pH buffer containing 10 mM glycine-HCl (pH 1.5-2.0). The regeneration was performed with a flow rate of 30-40 μl/min for 30-45 s. The measurements were duplicated, and only highly reproducible data was used for analysis. Binding sensorgrams for each Nb were processed and analyzed using BIAevaluation by fitting with the 1:1 Langmuir model or the 1:1 Langmuir model with the drifting baseline.

### Pseudotyped SARS-CoV-2 Neutralization Assay

[0203] The 293T-hsACE2 stable cell line (Cat #C-HA101, Lot #TA060720C) and the pseudotyped SARS-CoV-2 (Wuhan-Hu-1 strain, D614G, Alpha, Beta, Lambda, Delta and Omicron) particles with luciferase reporters were purchased from the Integral Molecular. The neutralization assay was carried out according to the manufacturers' protocols. In brief, 3- or 5-fold serially diluted Nbs/immunized V_{H}H mixture was incubated with the pseudotyped SARS-CoV-2-luciferase for accurate measurements. At least seven concentrations were tested for each Nb and at least two repeats of each Nb were done. Pseudovirus in culture media without Nbs was used as a negative control. 100 μl of the mixtures were then incubated with 100 μl 293T-hsACE2 cells at 2.5×10e⁵ cells/ml in the 96-well plates. The infection took ˜72 hrs at 37° C. with 5% CO₂. The luciferase signal was measured using the Renilla-Glo luciferase assay system (Promega, Cat #E2720) with the luminometer at 1 ms integration time. The obtained relative luminescence signals (RLU) from the negative control wells were normalized and used to calculate the neutralization percentage at each concentration. Data was processed by Prism 9 (GraphPad) to fit into a 4PL curve and to calculate the log IC₅₀ (half-maximal inhibitory concentration).

### SARS-CoV-2 Munich and Delta Plaque Reduction Neutralization Test (PRNT)

[0204] Nbs were diluted in a 3- or 5-fold series in Opti-MEM (Thermo). Each Nb dilution (110 l) was mixed with 110 μl of SARS-CoV-2 (Munich strain) containing 100 plaque-forming units (p.f.u.) or 110 μl of SARS-CoV-2 (Delta strain, BEI Cat #NR55611) containing 50 p.f.u. of the virus in Opti-MEM. The Nb-virus mixes (220W total) were incubated at 37° C. for 1 h, after which they were added dropwise onto confluent Vero E6 cell (ATCC® CRL-1586™, for Munich) or Vero E6-TMPRSS2-T2A-ACE2 cells (BEI cat #NR-54970, for Delta) monolayers in the six-well plates. After incubation at 37° C., 5% (v/v) CO₂ for 1 h, 2 ml of 0.1% (w/v) immunodiffusion agarose (MP Biomedicals) for Munich strain and 0.25% (w/v) immunodiffusion agarose for Delta strain in Dulbecco's modified eagle medium (DMEM) (Thermo) with 10% (v/v) FBS and 1× pen-strep was added to each well. The cells were incubated at 37° C., 5% CO₂ for 72 hrs. The agarose overlay was removed and the cell monolayer was fixed with 1 ml/well formaldehyde (Fisher) for 20 min at room temperature. Fixative was discarded and 1 ml/well of 1% (w/v) crystal violet in 10% (v/v) methanol was added. Plates were incubated at room temperature for 20 min and rinsed thoroughly with water. Plaques were then enumerated and the 50% plaque reduction neutralization titer (PRNT₅₀) was calculated. A validated SARS-CoV-2 antibody-negative human serum control, a validated NIBSC SARS-CoV-2 plasma control, was obtained from the National Institute for Biological Standards and Control, UK) and an uninfected cells control were also performed to ensure that virus neutralization by antibodies was specific.

### Aerosolization of PiN Using a Soft-Mist Inhaler

[0205] Nb was eluted and collected in the SEC running buffer (20 mM HEPES, 150 mM NaCl, pH 7.5) and then concentrated to 0.5 ml (1 mg/ml). Nb was aerosolized by using a portable soft mist inhaler Pulmospray@(Resyca). Around 0.1-0.15 ml dead volume was observed in the syringe and connector. The aerosols were collected in a 50 ml falcon tube and SEC analysis was performed as described above.

### Cryo-Electron Microscopy Data Collection and Image Processing

[0206] SARS-CoV-2 HexaPro spike at 1.1 mg/mL was incubated with 1.5-fold molar excess of specified Nbs at room temperature for two hours. 3.5 μL of 1 to 3 dilution sample using HBS buffer with 1% glycerol was applied onto a freshly glow discharged UltraAuFoil R1.2/1.3 grid (300 mesh) and plunge frozen using a vitrobot Mark IV (Thermo Fisher Scientific) with a blot force of 0 and 2.5 s blot time at 100% humidity at 4° C. The cryoEM datasets were collected at either CWRU or PNCC.

[0207] For CWRU datasets, movie stacks were recorded using an FEI Titan Krios transmission electron microscope G3i operated at 300 keV and equipped with a Gatan K3 direct electron detector and Gatan BioQuantum image filter operated in zero-loss mode with a slit width of 20 eV. Automated data collection was carried out using serialEM at a nominal magnification of 81,000× with a physical pixel size of 1.07 Å/pixel (0.535 Å/pixel at super-resolution) for spike:nanobody complexes and 165,000× with a physical pixel size of 0.52 Å/pixel (0.26 Å/pixel at super-resolution) for RBD:nanobodies complexes. Each movie stack was collected with a dose rate of 18 electron/pixel/s in super-resolution mode and fractionated in 40 frames with two-second exposure, resulting in a total dose of ˜31.4 e/Å2 for 81,000× and in 32 frames with 1.5-second exposure, resulting in a total dose of ˜103.4 e/Å2 for 81,000×. The number of movies for a specified dataset was listed in Supplementary Table X. The defocus range was set to between −0.5 and −2 μm.

[0208] For PNCC datasets, movie stacks were recorded using an FEI Titan Krios transmission electron microscope G3i operated at 300 keV and equipped with a Gatan K3 direct electron detector and Gatan BioContinuum image filter operated in zero-loss mode with a slit width of 20 eV. Automated data collection was carried out using serialEM at a nominal magnification of 64,000× with a physical pixel size of 1.329 Å/pixel (0.6645 Å/pixel at super-resolution). The dose rate was determined over a sample hole to calculate the exposure time resulting in a total dose of 40 e/Å2 and the exposures were fractionated into a total of 40 frames. The number of movies for a specified dataset was listed in Supplementary Table X. The defocus range was set to between −0.5 and −2 μm.

[0209] Image processing was performed on-the-fly using CryoSPARC Live version 3.2. The particles were automatically picked using the blob picker with 240 Å or 100 Å diameter for spike:nanobody or RBD:nanobodies, respectively. Reference-free 2D classification was performed in streaming with 200 classes and limited maximum resolution to 18 Å. Upon the completion of data collection, the selected particles from the good 2D class averages were subjected for another round of 2D classification with 200 classes, and particles from classes with resolution better than 10 Å and ECA less than 2 were selected for subsequent analysis. These 2D classes were submitted for a “rebalance 2D” job type to trim particles from dominant views. The rebalanced particle set was then used for ab-initio reconstruction to generate the initial volume. 3D refinement was first carried out using non-uniform refinement using ab-initio volume as the reference without mask. To resolve the density for nanobodies, an RBD structure (PDB 6MOJ) was docked into the cryoEM density and the structural model for nanobody was manually placed into the additional density accounted for nanobodies to ensure the correct orientation. The resulting RBD:nanobody model was used to generate the mask for focused 3D classification in CryoSPARC version 3.3.1 with six classes and target resolution of 6 Å, and PCA was chosen as the initialization mode with the parameter “number of components” set for 2. 3D classes with both RBD and nanobody densities well resolved were selected for sequent new local refinement with the mask around RBD and nanobody. The gold-standard Fourier shell correlation (FSC) of 0.143 criterion was used to report the resolution and the FSC curves were corrected for the effects of a soft mask using high-resolution noise substitution.

### Model Building and Refinement

[0210] PDB entry, 7CAK, was used as the initial model for spike excluding RBD and the missing fragment for residue 621 to 640 was modeled de novo in Coot. RBD from PDB entry, 6MOJ, was used as the initial model and nanobodies structures were generated using ColabFold. After assembling individual components into a single PDB file, the models were refined into the composite map using phenix.real_space_refine. The glycans were built using the carbohydrate module in Coot. Models were manually corrected in Coot (version 9.6.0) between rounds of read-space refinement in Phenix. Figure panels depicting cryo-EM maps or atomic models generated using ChimeraX (Pettersen et al., 2021). Maps colored by local resolution were generated using RELION 3.1 (Zivanov et al., 2018).

Crystallographic Analysis of psNbs with RBD

[0211] The receptor-binding domain (RBD) of the SARS-CoV-2 spike (S) protein (GenBank: QHD43416.1) used in crystallographic study, was cloned into a customized pFastBac vector, and fused with an N-terminal gp67 signal peptide and C-terminal His6 tag. Recombinant bacmids encoding each RBDs were generated using the Bac-to-Bac system (Thermo Fisher Scientific) followed by transfection into Sf9 cells using FuGENE HD (Promega) to produce baculoviruses for RBD expression. RBD protein was expressed in High Five cells (Thermo Fisher Scientific) with suspension culture shaking at 110 r.p.m. at 28° C. for 72 hours after the baculovirus transduction at an MOI of 5 to 10. Supernatant containing RBD protein was then concentrated using a 10 kDa MW cutoff Centramate cassette (Pall Corporation) followed by affinity chromatography using Ni-NTA resin (QIAGEN) and size exclusion chromatography using a HiLoad Superdex 200 pg column (Cytiva). The purified protein sample was buffer exchanged into 20 mM Tris-HCl pH 7.4 and 150 mM NaCl and concentrated for binding analysis and crystallographic studies.

[0212] Nb117+SARS-CoV-2 RBD and 5p118+SARS-CoV-2 RBD+CC12.1 complex were formed by mixing each of the protein components in an equimolar ratio and incubating overnight at 4° C. 384 conditions of the JCSG Core Suite (Qiagen) were used for setting-up trays for screening the Nb117 complex (12 mg/ml) and 5p-118 complex (14.3 mg/ml) on our robotic CrystalMation system (Rigaku) at Scripps Research. Crystallization trials were set-up by the vapor diffusion method in sitting drops containing 0.1 μl of protein complex and 0.1 μl of reservoir solution. Crystals appeared on day 3, were harvested on day 12, pre-equilibrated in cryoprotectant containing 0-10% ethylene glycol, and then flash cooled and stored in liquid nitrogen until data collection. X-ray diffraction data were collected at cryogenic temperature (100 K) at beamlines 23-ID-D of the Advanced Photon Source (APS) at Argonne National Laboratory and were collected from crystals grown in drops containing 20% polyethylene glycol 8000, 0.1 M NaCl, 0.1M CAPS pH 10.5 for the Nb117 complex and drops containing 40% MPD, 0.1M cacodylate pH 6.5, 5% (w/v) polyethylene glycol 8000 for the 5p118 complex. Collected data were processed with HKL2000. X-ray structures were solved by molecular replacement (MR) using PHASER with original MR models for the RBD and Nanobody from PDB 7JMW and PDB 7KN5. Iterative model building and refinement were carried out in COOT and PHENIX, respectively.

### RBD Epitope Analysis by ScanNet

[0213] The epitope propensity profile of SARS-CoV-2 RBD (PDB 7jvb) was computed by ScanNet, a state-of-the-art geometric deep learning model for structure-based protein binding site prediction. We used the B-cell epitope network (ScanNet-BCE) without evolutionary information, that was not trained on any SARS-CoV-1/2 antibody/antigen complex.

### Conservation and ScanNet Analysis of Viral Antigens

[0214] Dataset preparation. We collected all viral antibody—antigen complexes in PDB. Antigens were clustered at 70% sequence identity with a minimum length coverage of 15% using CD-HIT, the Bio.align pairwise sequence alignment module and CATH domain identifiers. Briefly, we found that (i) ngram-based clustering using CD-HIT with default parameters overestimated the number of clusters, while (ii) computing all the entries of the pairwise sequence similarity matrix was intractable for our set of several thousands structures. We instead proceeded as follows: for a given sequence identity cut-off T (e.g. 100), sequences were clustered with CD-HIT, and the resulting representatives were further clustered at T-20. For each pair of T-representatives with identical CATH identifier or same T-20 cluster, the sequence identity and coverage were evaluated by pairwise alignment and the corresponding T-clusters were merged if necessary. The process was iterated at T=100%, 95%, 90%, 70% sequence identity cut-offs and yielded satisfactory clusters. We further grouped together the following antigen clusters that had lower sequence identity but high structure similarity: (i) Influenza Hemagglutinin from strands H1N1, H3N2, H5N1, H7N9, H2N2 and (ii) Envelope protein of Dengue 1, Dengue 2, Dengue 4 and Zika. Only clusters with at least 7 unique antibodies were retained for further analysis, yielding 11 viral antigens.

[0215] Antibody hit rate calculation. We constructed a multiple sequence alignment for each antigen cluster using MAFFT and selected a representative structure with highest structure coverage and resolution. For each column of the alignment, the antibody hit rate was calculated as the fraction of unique antibodies binding it. For each complex, we identified the epitope residues as the antigen residues having at least one heavy atom within 4 Å of at least one antibody heavy atom. Our analysis was performed on the antigen surface residues (relative accessible surface area >=0.25, computed within the biological assembly for multimeric antigens using Bio.DSSP). Finally, the column-wise antibody hit rate was projected back onto the surface residues representative structure.

[0216] Calculation of antigen conservation and epitope propensity. For each representative antigen chain, a multiple sequence alignment was constructed by homology search on the UniRef30_2020_06 sequence database using HHBlits (4 iterations, default parameters). The alignment was deduplicated, hits with high gap content (>=25% of the alignment) were discarded and the 10K best hits were retained based on sequence identity. Each sequence was assigned a weight inversely proportional to the number of similar sequences found in the alignment (90% sequence identity cut-off). The amino acid frequency at each site fᵢ(a) was subsequently calculated and the residue-wise conservation score was defined as Cᵢ=Ln(20)−S(fᵢ) where S(fᵢ)=. Conservation scores range from 0 to ln(20)=2.99, higher is more conserved. We checked that this protocol correlated well with the ConSurf method based on phylogenetic trees {reference}. Epitope propensity scores were calculated with ScanNet-BCE.

[0217] RMSF calculation. Root mean square fluctuation of each RBD residue was calculated based on 100 ns Molecular Dynamics simulation trajectory. The simulation was run starting from the RBD structure (PDB 61zg) using Gromacs 2020 version with the CHARMM36m force field {Huang, 2017 #148}. The RBD structure was solvated in transferable intermolecular potential with 3 points (TIP3P) water molecules and ions were added to equalize the total system charge.

[0218] The steepest descent algorithm was used for initial energy minimization until the system converged at Fmax<1,000 kJ/(mol·nm). Then water and ions were allowed to equilibrate around the protein in a two-step equilibration process. The first part of equilibration was at a constant number of particles, volume, and temperature (NVT). The second part of equilibration was at a constant number of particles, pressure, and temperature (NPT). For both MD equilibration parts, positional restraints of k=1,000 kJ/(mol·nm2) were applied to heavy atoms of the protein, and the system was allowed to equilibrate at a reference temperature of 300 K, or reference pressure of 1 bar for 100 ps at a time step of 2 fs. Altogether 10,000 frames were saved for the RMSF analysis at intervals of 10 ps. To estimate average epitope RMSF, we defined epitope residues as residues with at least one atom within 4 Å from the Nb atom and averaged RMSF over epitope residues.

### Identification and Characterization of a Large Repertoire of Potent Pan-Sarbecovirus Nbs.

[0219] Single-chain VHH antibodies were isolated from two consecutive immunization bleeds. Immunizations span 6 months in which the first bleed was collected approximately 2 months after priming, followed by additional boosts for 3 months before the second bleed was collected (Methods). Polyclonal VHH mixtures show comparably high affinities to RBD_{SARS-CoV-2} between the first and second bleeds with overall ELISA IC50s of 0.13 nM to 0.04 nM, respectively (FIG. 23b, FIG. 29a). They also possess excellent neutralization potencies (IC50s between 0.3-0.6 nM) against the Wuhan-Hu-1 strain as well as Alpha and Lambda VOCs (FIG. 29b). Notably, compared to the initial VHHs which confer limited potencies against Beta, Delta, and SARS-COV, the potencies were substantially improved after the booster by 6.0, 2.3, and 9.3 folds, respectively, to 0.58, 1.90 and 1.65 nM (FIG. 29b). Surprisingly, the booster was also associated with strong and broad activities against the full spectrum of sarbeoviruses (FIG. 23a-23b). The relative binding affinities (ELISA IC50s) for RBDs from clade 1a (RBD_{SARS-CoV}), 2 (RBD_{RmYNO2-CoV}), and 3 (RBD_{BM-4831-CoV}) are 0.08, 0.09, and 0.14 nM, respectively, which correspond to the improvements of 8.5, 7.2, and 8.6 folds compared to the initial bleed (FIG. 29a).

[0220] Next, quantitative Nb proteomics were employed to identify high-affinity psNbs that confer broad-spectrum activities in immunized sera (Methods). This technology rapidly identified hundreds of distinct CDR3 families, from which a fraction of highly divergent Nbs were expressed and characterized. A total of 100 Nbs that interact strongly with RBD_{SARS-CoV-2} (Clade 1b) were confirmed to cross-react with other sarbecovirus clades (FIG. 23c, Table 2). Of these, 23%, 35%, and 42% were found to bind two, three, and all four sarbecovirus clades, respectively. Consistent with total polyclonal VHH activities, psNbs isolated from the booster show broader pan-sarbecovirus activities than the initial bleed (FIG. 30b). A substantial fraction (42%) can potently neutralize SARS-CoV-2 below 500 nM, with the best IC50 of 1 ng/ml (77 pM, 5p-182) and a median of 0.25 μg/ml (17 nM) (Table 2). Network analysis reveals that psNbs are dominated by at least seven clusters that span a large spectrum of physicochemical properties including isoelectric point (pI) and hydropathy (FIG. 23d, FIG. 30a). The three largest clusters are each composed of potent neutralizers that bind strongly to at least three sarbecovirus clades (Table 2). The other two clusters (represented by 5p-17, and 5p-175) show broad activities, yet only weakly neutralize SARS-CoV-2 in vitro (IC50>30 μg/ml, FIG. 34).

[0221] psNbs were further classified by epitope binning using size exclusion chromatography (SEC). psNb-RBD_{SARS-CoV-2} Complexes were competed with high-affinity benchmark Nbs (Nb21, Nb105, and Nb36) that bind distinct and well-characterized epitopes (FIG. 31a-31b, Methods). psNbs fall into five groups: groups B (33%) competes with Nb105, group C (9%) competes with Nb36, group D (17%) does not compete with any benchmark Nbs, and group A (3%) competes with Nb21 that targets RBS. Approximately one third of psNbs (Group E, 38%) bind strongly to RBDs based on ELISA, but do not neutralize pseudotyped SARS-CoV-2 efficiently and can dissociate from RBD on SEC. To investigate this discrepancy, a psNb (5p-156) was randomly selected and evaluated its binding in the presence and absence of RBD glycosylation by surface plasmon resonance (SPR). Analysis confirms that 5p-156 binds strongly to the fully glycosylated but not the de-glycosylated form (FIG. 31c, Methods). This data indicates that some group E psNbs targets a novel epitope encompassing the conserved, glycosylated RBD residue(s) N331 and/or N343. Together, these experiments demonstrate that a large cohort of high-affinity and divergent psNbs targeting multiple dominant RBD epitopes contribute to the broadly neutralizing activities in the immunized serum.

[0222] 17 psNbs spanning four SEC groups (A-D) were selected for characterization against five critical RBD mutants derived from SARS-CoV-2 VOCs including the Omicron that is spreading quickly around the world, and 18 different sarbecovirus RBDs. These psNbs bind strongly to all the VOCs that were evaluated. 16 of the 17 psNbs bind to all four clades (FIG. 24a). Seven psNbs (such as 5p-118 and 5p-132) have exceptionally broad activities that bind strongly to all 24 RBDs with the median ELISA IC50 of 3 nM (FIG. 24a, FIG. 32, Table 2), which usually corresponds to sub-nM dissociation constant (K_{D}) of Nb binding. Two representative psNbs were selected for binding kinetic measurements against all four clades by SPR. The K_{D}S of 5p-118 for RBD_{SARS-CoV-2} (Clade 1b), RBD_{SARS-CoV}(clade 1a), RBD_{RmYNO2-CoV} (clade 2), RBD_{BM-4831-CoV} (clade 3) are sub-pM, 3.96 pM, 0.59 nM and 3.60 nM (FIG. 24d, FIGS. 35a-35b), respectively. 5p-132 strongly binds clades 1b, 2 and 3 (respectively 0.39 nM, 1.4 nM and 0.044 nM) while moderately binding clade 1a (304 nM) (FIG. 24e, FIG. 35c-35f). Of note, these psNbs are highly specific and do not cross-react with the human whole protein extract at high concentrations (up to 8 μM).

[0223] All but one psNbs can potently inhibit SARS-CoV-2 and the VOCs in vitro, based on both a pseudovirus assay and a plaque reduction neutralization test (PRNT) against clinical isolates of the Munich strain and Delta VOC (FIG. 24b-24c, FIGS. 33-34, Methods). Group A Nb 5p-182, which preferentially binds to clade 1b, is extremely potent for SARS-CoV-2 and VOCs with a median neutralization potency of 1.2 ng/ml. Group C (R113, 5p-93 and 5p-132) neutralizes VOCs at single-digit μg/ml and is less effective against SARS-CoV. Group D (5p-109 and 5p-175) has an exceptional breadth yet only weakly neutralizes SARS-CoV-2 (IC50 7-132 μg/ml). The remaining Nbs belong to group B and show comparably high potency against SARS-CoV. The median potency for SARS-CoV-2 and VOCs is 86 ng/ml with the most potent one (5p-168) at 6 ng/ml. Notably, psNbs (such as 5p-118 and 5p-132) are usually highly stable and can withstand aerosolization without compromising activities (FIG. 24f, FIGS. 35e-35f).

[0224] This study developed a bispecific construct (PiN-118) by fusing two potent and stable psNbs (5p-118 and 5p-132), which cover two distinct and highly conserved epitopes (II and IV). Compared to the monomeric Nbs, the potency of PiN-118 improves by an order of magnitude to 12.8 ng/ml (0.4 nM) based on the PRNT assay using the Delta VOC (FIG. 24g). PiN-118 remains fully active after aerosolization using a portable and inexpensive nebulizer for clinical development (Methods).

Diversity, Convergence and Evolution of Broadly Neutralizing psNbs

[0225] To understand the mechanisms of broad neutralization, this study used cryoEM to determine the structures of 11 psNbs in complex with the SARS-CoV-2 spike or RBD. Additionally, 2 atomic psNb: RBD structures were determined by X-ray crystallography. Epitope clustering based on high-resolution structures reveals 5 main epitopes (FIG. 25a), which do not overlap with critical RBD mutations from the VOCs including Alpha, Beta, Delta, and the emerging Omicron (FIG. 25b, FIG. 36). Most psNbs, except for 5p-182, do not bind to RBS. Three quarters of the solvent-exposed and highly conserved RBD residues (sequence identity 85%) are covered by psNbs (Methods). Superposition to spike structure reveals that psNbs can lock RBDs preferentially in the 3-up conformation (FIG. 25c). Despite having different epitopes and orientations, however, the small size facilitates simultaneous binding of three copies to the spike trimer in a distinct and highly symmetric configuration.

[0226] Class II psNbs are overrepresented in our collection. Phylogenetic analysis reveals that while psNbs are diverse, those isolated from the booster are more converged than the initial bleed (FIG. 26a). 5 psNbs were structurally determined with the spike or RBD at high resolutions by X-ray crystallography and cryoEM (Methods). Analysis unveils two subclasses (A and B) based on epitopes and Nb scaffold orientations (FIG. 26b, 26d). II(A) and II(B) psNbs share a conserved hydrophobic core epitope (aa 377-386) (FIG. 26c) containing two bulk hydrophobic residues (F377 and Y380), and are stabilized by a disulfide bond (C379-C432). The improved breadth in class II(B) psNbs, especially for the clade 3, RBD_{BM-4831-CoV} lies in its ability to target an additional conserved region with peripheral charge residues (aa 412-415, 427-429), wherever class II(A) surveys a less conserved epitope of primarily hydrophobic residues (e.g., L368, A372, and Y508) (FIG. 26c). Interestingly, A372 residue on SARS-CoV-2 (clade 1a) is substituted to S/T in other clades, forming a consensus glycosylation motif (³⁷⁰NST/S³⁷²), which may explain the reduced neutralization potency of class II (A) psNbs but not class (B) against SARS-CoV (FIG. 24b, 26b).

[0227] Class II(B) psNbs comprise two large clusters possessing the best breadth and potency (FIG. 23d). Their epitopes largely overlap but interactions vary substantially. Two related psNbs (5p-38 and Nb117) are characterized by a short CDR3 (13 aa) forming a β finger conformation. psNb 5p38 is an all-clade binder while Nb117 binds strongly to all but RBD_{BM-4831-CoV} (clade 3) due to a substitution K378Q, which disrupts a critical salt bridge between D110 (Nb117) and K378 (RBD_{SARS-CoV-2}) (FIG. 26e, FIG. 37, 38a-38b, and 44). 5p-35 and 5p-118 (from the other dominant cluster) bind all 24 RBDs strongly with potent antiviral activities. The interactions are predominantly mediated by a long CDR3 loop (18 aa) with a small helix. These Nbs form hydrophobic interactions and also bind strongly to conserved charged residues (such as D427 and R408 on the rims of epitopes), forming electrostatic interactions (FIG. 26f, FIG. 37, 38c-38d, and 44).

[0228] Class II(A) psNb (5p-60) shares high sequence similarity with Nb105 (isolated from the initial bleed). The major difference lies in their CDR3 heads. Here, a small CDR3 loop of ¹⁰⁹DLF¹¹¹ in Nb105 is substituted by ¹⁰⁹QST¹¹¹ in 5p60, which inserts into two conserved pockets (RBD residues F377, Y369, F374 and residues S375, T376, Y508, V407) forming extensive hydrophobic interactions with the RBD (FIGS. 26g, 38E, and 45). This substitution allows psNb 5p-60 to tolerate sequence variation better, exhibiting over 100-fold higher affinities for clade 2 RBDs (Table 2).

[0229] Class I psNbs that bind RBS are extremely potent yet rare (˜3%). The structure of the ultrapotent 5p182 was resolved by cryoEM with the spike (FIG. 46). Superposition of 5p-182:RBD and ACE2:RBD (PDB 6MOJ) structures revealed major clashes between all three Nb framework regions and two CDRs (2 and 3) with the minor helix of hACE2 (aa 26-37, 66-87, 91-109, 187-194) (FIG. 27a). 5p-182 targets a small epitope (BSA 546 Å²) on the protruded RBS loop (aa 472-490) (FIG. 27c). Compared to the epitopes of other RBS Nbs that can be easily evaded by the circulating variants, most RBD mutations do not localize on the 5p-182 epitope (FIG. 27d). Here, 5p-182 utilizes all CDRs that form extensive networks of hydrophobic and polar interactions with two critical RBD residues that are absent in VOC mutations (F486 and Y489), and therefore, can achieve ultrahigh affinity for SARS-CoV-2 and retain strong binding and neutralization against the variants (FIG. 27c). 5p-182 can outcompete an ultrahigh-affinity Nb21 for binding to RBS (FIG. 47a). Interestingly, quantitative MS analysis reveals that multiple ultrapotent RBS binders (Nbs 20, 21 and 89) identified from the initial bleed were absent in the booster serum, indicating they are sourced from short-lived plasma cells (FIG. 47b).

[0230] Class III psNb (5p-93) can destabilize the spike in vitro. The structure was resolved by reconstituting an RBD: 4 Nbs complex that helps epitope determination by cryoEM (Methods, FIG. 46). 5p-93 targets a rare non-RBS epitope and overlaps with Nb17 (FIG. 27e) isolated from the initial bleed that is partially effective against variants. Class III psNb binds strongly to RBD variants and clade 1b and shows selectivity within other clades. Compared to Nb17 with limited breadth, the improved breadth of class III psNb is contributed by shifting (from residues 356-357 to residues 449-450, 481-484 and 490-494) towards a smaller yet more conserved epitope (FIG. 27f, FIG. 48).

[0231] Four Class IV psNbs (Nb113, 4p-56, 5p-179 and 5p-132) were resolved with the spike by cryoEM (Methods). These psNbs employ a plethora of mechanisms including distinct scaffold orientations, CDR combinations and molecular interactions. Class IV shares a highly conserved and cryptic epitope only accessible in the RBD-up conformation (FIG. 25a, 25c, 25g, FIG. 48). The epitope is characterized by charged and hydrophobic residues (D427/D428, T430, F464, ₅₁₆ELLH₅₁₉) forming a cavity (FIG. 25g). CDR3s of class IV adopt a “hairpin” conformation that inserts into the RBD cavity forming extensive hydrophobic and polar interactions. Nb113 and 4p56 are all-clade binders and can also recognize multiple other conserved RBD residues (L390, P426 and P463 for Nb113 and Y369 for 4p56) through hydrophobic interactions (FIG. 48C-48D). 5p-179 shows selectivity towards clade 1b and clade 3 likely due to a unique salt bridge between D124 (CDR3) and the semi-conserved H519 on RBDs (FIG. 48D). Notably, class IV epitope partially overlaps with a newly discovered broadly neutralizing antibody S2H97 and targets RBD from a distinct angle (FIG. 39). Compared to S2H97 which uses extensively bulky aromatic side chains (W, F. and Y) for interactions, the binding of Nb113 is primarily mediated by hydrophobic, non-aromatic residues (L, I, and V) and basic residues (R and H). Facilitated by a unique orientation, Class V psNbs (5p-64, which shares high CDR similarity with 5p-175) targets RBD through a conserved epitope (T333, L387,₃₈₉DLC₃₉₁, C525, L517, and P521) completely buried in the spike and a region marginally overlapping with class IV psNbs (i.e. L517 and H519) (FIG. 27h-27i). While 5p-64 can bind strongly to the RBD it does not bind the prefusion spike and therefore only neutralizes the virus poorly in vitro (FIG. 34).

Mechanisms of Broad Neutralization by psNbs

[0232] These comprehensive structural results provide direct evidence that with successive immunization, antibodies have emerged in circulation that concurrently and almost exhaustively target diverse and conserved physicochemical and geometric properties on RBD. For ultrahigh-affinity Nbs (i.e., sub-nM), their neutralization potencies are inversely correlated, almost perfectly with the distance of epitopes to the RBS (Methods). Ultrapotent class I psNbs neutralize the virus at single-digit ng/ml by binding to RBS to block hACE2 binding (FIG. 40). Class II psNbs still efficiently neutralize the virus (dozens ng/ml) primarily by sterically interfering with the receptor binding. In particular, their RBD binding can clash with the glycan moiety at N322 of ACE2, especially bulky complex-types (FIG. 40). Class III, IV and V possess substantially weaker potencies. Their epitopes are distant from RBS and do not compete with ACE2 in vitro.

[0233] To better understand the broad activities of psNbs, a set of high-affinity RBD Nbs available were also expressed from the PDB and their cross-reactivity was evaluated by ELISA (Methods). Nbs fall into two groups based on RBS occupancy (FIG. 28a). Overall, their cross-reactivities positively correlate with the epitope sequence conservation (FIG. 28a). psNbs that do not bind RBS can be clearly separated based on high epitope conservation (>0.85) with an exception of class III psNb (5p-93) (FIG. 28b). Critical mutations from the concerning variants are predominantly identified on RBS but also recently on a small patch of relatively conserved residues (e.g., residues 371, 373 and 375) from the emerging VOC Omicron (B.1.1.529). Additionally, the virus can mutate on A372S/T to acquire a N-linked glycan (N370) similar to other sarbeoviruses to blunt host antibody response. While most Nbs and human antibodies directly interact with these residues, psNbs are barely affected (FIG. 24a, FIG. 33). Mutations on these highly conserved epitopes can cause RBD instability reducing viral fitness (FIG. 28e).

[0234] psNbs target significantly smaller epitopes that are characterized by flat (class II and III) or convex (class I and IV) structures (FIG. 28c-28d). Compared to non-broadly neutralizing RBS Nbs, PsNb epitopes are significantly more flexible (FIG. 28d). Together, these geometric and physicochemical properties may render high-affinity binding particularly challenging. Consistently, ScanNet, a geometric deep-learning model reveals that RBS epitopes are predominantly targeted by Nbs (and IgG antibodies) while the psNb epitopes are hardly recognized (FIG. 41). Moreover, compared to non-psNbs, psNbs utilize almost exclusively hypervariable CDR loops. Conceivably, extensive affinity maturation is required to bind these conserved yet difficult-to-bind epitopes (FIG. 28f).

[0235] SARS-CoV-2 continues to evolve, producing a string of variants with high transmissibility and potential to evade host immunity. New evidence indicates that natural infection or vaccination by booster can improve the host antibody response against SARS-CoV-2 variants. This study shows that successive immunization of a camelid by recombinant RBD can enhance the development of super-immunity. Integrative proteomics facilitated the rapid identification of a large repertoire of high-affinity VHH antibodies (Nbs) from the immunized sera against SARS-CoV-2 VOCs and the full spectrum of divergent sarbecovirus family. CryoEM and X-ray crystallography were used to systematically map broadly neutralizing epitopes and interactions, providing insights into the structural basis and evolution of serologic activities. These data support that RBD structure alone can drive this remarkable evolution reshaping the immunogenic landscape towards conserved epitopes. The initial immune response predominantly targets RBS due to its favorable properties for protein-protein interactions (both host receptor and antibody binding). Here, high-affinity antibodies can evolve to saturate this critical region with the highest neutralization potency. However, antibodies that target conserved and difficult to bind epitopes emerge with unprecedented diversity and can continuously evolve with improved affinities and breadth. Their neutralization potencies vary substantially yet are strongly and negatively correlated with the distance of epitopes to the RBS— central for viral entry and effective host immunity. Together, the findings herein inform the development of safe and broadly protecting interventions including vaccines and therapeutics.

[0236] Preference for non-conserved epitopes is also observed in other viral antigen structures (FIG. 42). Evolutionary conservation imposes constraints on spatio-chemical surface properties, which in turn constraints the immunogenicity of epitopes, as supported by a negative correlation between conservation and predicted epitope propensity (FIG. 43). However, antibody repertoires are dynamic and can evolve towards conserved epitopes. In addition to COVID-19 super-immunity, broadly neutralizing antibodies have also been observed in HIV elite controllers, although they usually take years to evolve.

[0237] Highly selected psNbs can bind strongly and specifically to all sarbeoviruses for potent neutralization with the best median antiviral potencies at single-digit ng/ml, which is extremely rare for cross-reactive antibodies. Multivalent constructs (such as PiN-118) that target distinct and conserved epitopes and their cocktails may provide comprehensive coverage against future SARS-CoV-2 antigenic drift and new sarbecovirus challenges. The low production costs and marked stability of Nbs (and other miniproteins) allow for more equitable and efficient distributions globally, particularly for developing countries and regions that are vulnerable to spillovers. Combined with small size (high effective dose and bioavailability) and flexible administration routes that protect both upper and lower respiratory tracts to limit airborne transmissions, ultrapotent and inhalable psNbs are therefore highly complementary to vaccines, small molecule drugs, and monoclonal antibody therapeutics. Prospects of racing against future outbreaks will rely on the fast development and equitable distribution of an arsenal of broadly protecting, cost-effective and convenient technologies.

TABLE 1
Nanobodies and the corresponding sequences
of CDR3s and amino acid sequences.

| | | Representative amino |
|---|---|---|
| Nb name | CDR3 | acid Sequence |
| 5-39794-30 | SEQ ID NO: 1 | SEQ ID NO: 1058 |
| 5-14179-7 | SEQ ID NO: 2 | SEQ ID NO: 1059 |
| 5-78318-21 | SEQ ID NO: 3 | SEQ ID NO: 1060 |
| 5-102900-4 | SEQ ID NO: 4 | SEQ ID NO: 1061 |
| 5-23383-106 | SEQ ID NO: 5 | SEQ ID NO: 1062 |
| 5-730537-2 | SEQ ID NO: 6 | SEQ ID NO: 1063 |
| 5-9009-164 | SEQ ID NO: 7 | SEQ ID NO: 1064 |
| 5-10975-157 | SEQ ID NO: 8 | SEQ ID NO: 1065 |
| 5-30903-18 | SEQ ID NO: 9 | SEQ ID NO: 1066 |
| 5-1900414-232 | SEQ ID NO: 10 | SEQ ID NO: 1067 |
| 5-1109652-2 | SEQ ID NO: 11 | SEQ ID NO: 1068 |
| 5-1108791-32 | SEQ ID NO: 12 | SEQ ID NO: 1069 |
| 5-2526959-389 | SEQ ID NO: 13 | SEQ ID NO: 1070 |
| 5-1133032-5 | SEQ ID NO: 14 | SEQ ID NO: 1071 |
| 5-3107926-2 | SEQ ID NO: 15 | SEQ ID NO: 1072 |
| 5-2847738-2 | SEQ ID NO: 16 | SEQ ID NO: 1073 |
| 5-8769-74 | SEQ ID NO: 17 | SEQ ID NO: 1074 |
| 5-1413846-2 | SEQ ID NO: 18 | SEQ ID NO: 1075 |
| 5-1838762-2 | SEQ ID NO: 19 | SEQ ID NO: 1076 |
| 5-394886-2 | SEQ ID NO: 20 | SEQ ID NO: 1077 |
| 5-102503-3 | SEQ ID NO: 21 | SEQ ID NO: 1078 |
| 5-2551664-138 | SEQ ID NO: 22 | SEQ ID NO: 1079 |
| 5-2838419-3 | SEQ ID NO: 23 | SEQ ID NO: 1080 |
| 5-16102-4 | SEQ ID NO: 24 | SEQ ID NO: 1081 |
| 5-1013371-278 | SEQ ID NO: 25 | SEQ ID NO: 1082 |
| 5-14972-84 | SEQ ID NO: 26 | SEQ ID NO: 1083 |
| 5-36836-83 | SEQ ID NO: 27 | SEQ ID NO: 1084 |
| 5-571698-2 | SEQ ID NO: 28 | SEQ ID NO: 1085 |
| 5-329785-4 | SEQ ID NO: 29 | SEQ ID NO: 1086 |
| 5-14492-49 | SEQ ID NO: 30 | SEQ ID NO: 1087 |
| 5-1141754-6 | SEQ ID NO: 31 | SEQ ID NO: 1088 |
| 5-1044153-14 | SEQ ID NO: 32 | SEQ ID NO: 1089 |
| 4-4886354-26 | SEQ ID NO: 33 | SEQ ID NO: 1090 |
| 4-4813103-18 | SEQ ID NO: 34 | SEQ ID NO: 1091 |
| 4-4652444-35 | SEQ ID NO: 35 | SEQ ID NO: 1092 |
| 4-5024890-28 | SEQ ID NO: 36 | SEQ ID NO: 1093 |
| 4-6738235-2 | SEQ ID NO: 37 | SEQ ID NO: 1094 |
| 4-2399101-2 | SEQ ID NO: 38 | SEQ ID NO: 1095 |
| 4-6250396-10 | SEQ ID NO: 39 | SEQ ID NO: 1096 |
| 4-1859660-41 | SEQ ID NO: 40 | SEQ ID NO: 1097 |
| 4-8547239-20 | SEQ ID NO: 41 | SEQ ID NO: 1098 |
| 4-1967764-2 | SEQ ID NO: 42 | SEQ ID NO: 1099 |
| 4-765578-3 | SEQ ID NO: 43 | SEQ ID NO: 1100 |
| 4-101491-2 | SEQ ID NO: 44 | SEQ ID NO: 1101 |
| 4-8258415-2 | SEQ ID NO: 45 | SEQ ID NO: 1102 |
| 4-4695694-139 | SEQ ID NO: 46 | SEQ ID NO: 1103 |
| 4-2080196-11 | SEQ ID NO: 47 | SEQ ID NO: 1104 |
| 4-8542-164 | SEQ ID NO: 48 | SEQ ID NO: 1105 |
| 4-1779285-28 | SEQ ID NO: 49 | SEQ ID NO: 1106 |
| 4-2442780-60 | SEQ ID NO: 50 | SEQ ID NO: 1107 |
| 5-1164169-19 | SEQ ID NO: 51 | SEQ ID NO: 1108 |
| 5-2886632-2 | SEQ ID NO: 52 | SEQ ID NO: 1109 |
| 5-2559667-11 | SEQ ID NO: 53 | SEQ ID NO: 1110 |
| 5-1008455-104 | SEQ ID NO: 54 | SEQ ID NO: 1111 |
| 5-1086510-9 | SEQ ID NO: 55 | SEQ ID NO: 1112 |
| 5-162797-4 | SEQ ID NO: 56 | SEQ ID NO: 1113 |
| 5-2003166-4 | SEQ ID NO: 57 | SEQ ID NO: 1114 |
| 5-1032995-47 | SEQ ID NO: 58 | SEQ ID NO: 1115 |
| 5-1091941-13 | SEQ ID NO: 59 | SEQ ID NO: 1116 |
| 5-2201307-2 | SEQ ID NO: 60 | SEQ ID NO: 1117 |
| 5-2004369-2 | SEQ ID NO: 61 | SEQ ID NO: 1118 |
| 5-2545555-11 | SEQ ID NO: 62 | SEQ ID NO: 1119 |
| 5-71439-2 | SEQ ID NO: 63 | SEQ ID NO: 1120 |
| 5-184834-4 | SEQ ID NO: 64 | SEQ ID NO: 1121 |
| 5-664328-2 | SEQ ID NO: 65 | SEQ ID NO: 1122 |
| 5-36941-14 | SEQ ID NO: 66 | SEQ ID NO: 1123 |
| 5-203629-16 | SEQ ID NO: 67 | SEQ ID NO: 1124 |
| 5-748013-2 | SEQ ID NO: 68 | SEQ ID NO: 1125 |
| 5-1488982-2 | SEQ ID NO: 69 | SEQ ID NO: 1126 |
| 5-7538-125 | SEQ ID NO: 70 | SEQ ID NO: 1127 |
| 5-1021404-105 | SEQ ID NO: 71 | SEQ ID NO: 1128 |
| 5-1183153-5 | SEQ ID NO: 72 | SEQ ID NO: 1129 |
| 5-16666-24 | SEQ ID NO: 73 | SEQ ID NO: 1130 |
| 5-1923420-2 | SEQ ID NO: 74 | SEQ ID NO: 1131 |
| 5-91479-3 | SEQ ID NO: 75 | SEQ ID NO: 1132 |
| 5-401288-3 | SEQ ID NO: 76 | SEQ ID NO: 1133 |
| 5-6679-554 | SEQ ID NO: 77 | SEQ ID NO: 1134 |
| 5-2178053-2 | SEQ ID NO: 78 | SEQ ID NO: 1135 |
| 5-1989624-5 | SEQ ID NO: 79 | SEQ ID NO: 1136 |
| 5-1285961-2 | SEQ ID NO: 80 | SEQ ID NO: 1137 |
| 5-707174-3 | SEQ ID NO: 81 | SEQ ID NO: 1138 |
| 5-1136487-2 | SEQ ID NO: 82 | SEQ ID NO: 1139 |
| 5-2747983-3 | SEQ ID NO: 83 | SEQ ID NO: 1140 |
| 5-222289-8 | SEQ ID NO: 84 | SEQ ID NO: 1141 |
| 5-10519-382 | SEQ ID NO: 85 | SEQ ID NO: 1142 |
| 5-2610818-2 | SEQ ID NO: 86 | SEQ ID NO: 1143 |
| 5-1157289-2 | SEQ ID NO: 87 | SEQ ID NO: 1144 |
| 5-2625886-7 | SEQ ID NO: 88 | SEQ ID NO: 1145 |
| 5-2537388-104 | SEQ ID NO: 89 | SEQ ID NO: 1146 |
| 5-26593-46 | SEQ ID NO: 90 | SEQ ID NO: 1147 |
| 5-59087-28 | SEQ ID NO: 91 | SEQ ID NO: 1148 |
| 5-1131442-8 | SEQ ID NO: 92 | SEQ ID NO: 1149 |
| 5-2823876-4 | SEQ ID NO: 93 | SEQ ID NO: 1150 |
| 5-38836-59 | SEQ ID NO: 94 | SEQ ID NO: 1151 |
| 5-1906337-430 | SEQ ID NO: 95 | SEQ ID NO: 1152 |
| 5-1141754-6 | SEQ ID NO: 96 | SEQ ID NO: 1153 |
| 5-1143805-6 | SEQ ID NO: 97 | SEQ ID NO: 1154 |
| 5-82516-7 | SEQ ID NO: 98 | SEQ ID NO: 1155 |
| 5-1931110-4 | SEQ ID NO: 99 | SEQ ID NO: 1156 |
| 5-1065288-6 | SEQ ID NO: 100 | SEQ ID NO: 1157 |
| 5-2525750-813 | SEQ ID NO: 101 | SEQ ID NO: 1158 |
| 5-2547451-2 | SEQ ID NO: 102 | SEQ ID NO: 1159 |
| 5-2581500-3 | SEQ ID NO: 103 | SEQ ID NO: 1160 |
| 5-199676-4 | SEQ ID NO: 104 | SEQ ID NO: 1161 |
| 5-423822-2 | SEQ ID NO: 105 | SEQ ID NO: 1162 |
| 5-7632-31 | SEQ ID NO: 106 | SEQ ID NO: 1163 |
| 5-21526-67 | SEQ ID NO: 107 | SEQ ID NO: 1164 |
| 5-1928020-43 | SEQ ID NO: 108 | SEQ ID NO: 1165 |
| 5-1011284-458 | SEQ ID NO: 109 | SEQ ID NO: 1166 |
| 5-1550639-2 | SEQ ID NO: 110 | SEQ ID NO: 1167 |
| 5-2591036-2 | SEQ ID NO: 111 | SEQ ID NO: 1168 |
| 5-30916-15 | SEQ ID NO: 112 | SEQ ID NO: 1169 |
| 5-1382556-3 | SEQ ID NO: 113 | SEQ ID NO: 1170 |
| 5-2804995-2 | SEQ ID NO: 114 | SEQ ID NO: 1171 |
| 5-2539334-42 | SEQ ID NO: 115 | SEQ ID NO: 1172 |
| 5-316812-2 | SEQ ID NO: 116 | SEQ ID NO: 1173 |
| 5-48940-15 | SEQ ID NO: 117 | SEQ ID NO: 1174 |
| 5-1020089-113 | SEQ ID NO: 118 | SEQ ID NO: 1175 |
| 5-1080805-3 | SEQ ID NO: 119 | SEQ ID NO: 1176 |
| 5-1025130-333 | SEQ ID NO: 120 | SEQ ID NO: 1177 |
| 5-136494-2 | SEQ ID NO: 121 | SEQ ID NO: 1178 |
| 5-1011192-81 | SEQ ID NO: 122 | SEQ ID NO: 1179 |
| 5-2920582-2 | SEQ ID NO: 123 | SEQ ID NO: 1180 |
| 5-2523238-1186 | SEQ ID NO: 124 | SEQ ID NO: 1181 |
| 5-1022580-11 | SEQ ID NO: 125 | SEQ ID NO: 1182 |
| 5-3096069-3 | SEQ ID NO: 126 | SEQ ID NO: 1183 |
| 5-2534790-54 | SEQ ID NO: 127 | SEQ ID NO: 1184 |
| 5-1912390-63 | SEQ ID NO: 128 | SEQ ID NO: 1185 |
| 5-2534689-20 | SEQ ID NO: 129 | SEQ ID NO: 1186 |
| 5-1930836-13 | SEQ ID NO: 130 | SEQ ID NO: 1187 |
| 5-260759-11 | SEQ ID NO: 131 | SEQ ID NO: 1188 |
| 5-66535-4 | SEQ ID NO: 132 | SEQ ID NO: 1189 |
| 5-888206-2 | SEQ ID NO: 133 | SEQ ID NO: 1190 |
| 5-3009418-2 | SEQ ID NO: 134 | SEQ ID NO: 1191 |
| 5-290490-2 | SEQ ID NO: 135 | SEQ ID NO: 1192 |
| 5-2525729-31 | SEQ ID NO: 136 | SEQ ID NO: 1193 |
| 5-1008440-227 | SEQ ID NO: 137 | SEQ ID NO: 1194 |
| 5-285392-2 | SEQ ID NO: 138 | SEQ ID NO: 1195 |
| 5-313839-4 | SEQ ID NO: 139 | SEQ ID NO: 1196 |
| 5-2569271-9 | SEQ ID NO: 140 | SEQ ID NO: 1197 |
| 5-2548136-20 | SEQ ID NO: 141 | SEQ ID NO: 1198 |
| 5-159124-6 | SEQ ID NO: 142 | SEQ ID NO: 1199 |
| 5-7606-45 | SEQ ID NO: 143 | SEQ ID NO: 1200 |
| 5-4197-8 | SEQ ID NO: 144 | SEQ ID NO: 1201 |
| 5-87906-2 | SEQ ID NO: 145 | SEQ ID NO: 1202 |
| 5-1381257-2 | SEQ ID NO: 146 | SEQ ID NO: 1203 |
| 5-119896-2 | SEQ ID NO: 147 | SEQ ID NO: 1204 |
| 5-2045969-5 | SEQ ID NO: 148 | SEQ ID NO: 1205 |
| 5-1456715-2 | SEQ ID NO: 149 | SEQ ID NO: 1206 |
| 5-7049-253 | SEQ ID NO: 150 | SEQ ID NO: 1207 |
| 5-1401597-4 | SEQ ID NO: 151 | SEQ ID NO: 1208 |
| 5-1391-91 | SEQ ID NO: 152 | SEQ ID NO: 1209 |
| 5-1045786-32 | SEQ ID NO: 153 | SEQ ID NO: 1210 |
| 5-1898733-64 | SEQ ID NO: 154 | SEQ ID NO: 1211 |
| 5-1899-188 | SEQ ID NO: 155 | SEQ ID NO: 1212 |
| 5-1904653-45 | SEQ ID NO: 156 | SEQ ID NO: 1213 |
| 5-501185-2 | SEQ ID NO: 157 | SEQ ID NO: 1214 |
| 5-1050935-8 | SEQ ID NO: 158 | SEQ ID NO: 1215 |
| 5-391946-4 | SEQ ID NO: 159 | SEQ ID NO: 1216 |
| 5-2529215-7 | SEQ ID NO: 160 | SEQ ID NO: 1217 |
| 5-54711-21 | SEQ ID NO: 161 | SEQ ID NO: 1218 |
| 5-1315866-2 | SEQ ID NO: 162 | SEQ ID NO: 1219 |
| 4-459573-5 | SEQ ID NO: 163 | SEQ ID NO: 1220 |
| 4-1768361-154 | SEQ ID NO: 164 | SEQ ID NO: 1221 |
| 4-13096425-2 | SEQ ID NO: 165 | SEQ ID NO: 1222 |
| 4-7244663-2 | SEQ ID NO: 166 | SEQ ID NO: 1223 |
| 4-5553420-2 | SEQ ID NO: 167 | SEQ ID NO: 1224 |
| 4-13845232-2 | SEQ ID NO: 168 | SEQ ID NO: 1225 |
| 4-13339139-5 | SEQ ID NO: 169 | SEQ ID NO: 1226 |
| 4-8550695-4 | SEQ ID NO: 170 | SEQ ID NO: 1227 |
| 4-2097055-32 | SEQ ID NO: 171 | SEQ ID NO: 1228 |
| 4-7261410-2 | SEQ ID NO: 172 | SEQ ID NO: 1229 |
| 4-1815677-2 | SEQ ID NO: 173 | SEQ ID NO: 1230 |
| 4-3434681-3 | SEQ ID NO: 174 | SEQ ID NO: 1231 |
| 4-10700225-2 | SEQ ID NO: 175 | SEQ ID NO: 1232 |
| 4-2563169-12 | SEQ ID NO: 176 | SEQ ID NO: 1233 |
| 4-4633968-222 | SEQ ID NO: 177 | SEQ ID NO: 1234 |
| 4-1783819-2 | SEQ ID NO: 178 | SEQ ID NO: 1235 |
| 4-1277549-5 | SEQ ID NO: 179 | SEQ ID NO: 1236 |
| 4-9000521-4 | SEQ ID NO: 180 | SEQ ID NO: 1237 |
| 4-5704963-3 | SEQ ID NO: 181 | SEQ ID NO: 1238 |
| 4-3290480-2 | SEQ ID NO: 182 | SEQ ID NO: 1239 |
| 4-2343719-73 | SEQ ID NO: 183 | SEQ ID NO: 1240 |
| 4-2904900-18 | SEQ ID NO: 184 | SEQ ID NO: 1241 |
| 4-54624-57 | SEQ ID NO: 185 | SEQ ID NO: 1242 |
| 4-1380946-8 | SEQ ID NO: 186 | SEQ ID NO: 1243 |
| 4-1863754-148 | SEQ ID NO: 187 | SEQ ID NO: 1244 |
| 4-2397452-2 | SEQ ID NO: 188 | SEQ ID NO: 1245 |
| 4-437807-22 | SEQ ID NO: 189 | SEQ ID NO: 1246 |
| 4-2576489-13 | SEQ ID NO: 190 | SEQ ID NO: 1247 |
| 4-2391037-10 | SEQ ID NO: 191 | SEQ ID NO: 1248 |
| 4-6778424-2 | SEQ ID NO: 192 | SEQ ID NO: 1249 |
| 4-9871969-2 | SEQ ID NO: 193 | SEQ ID NO: 1250 |
| 4-12222-45 | SEQ ID NO: 194 | SEQ ID NO: 1251 |
| 4-2095401-49 | SEQ ID NO: 195 | SEQ ID NO: 1252 |
| 4-4779103-56 | SEQ ID NO: 196 | SEQ ID NO: 1253 |
| 4-2719802-4 | SEQ ID NO: 197 | SEQ ID NO: 1254 |
| 4-844927-2 | SEQ ID NO: 198 | SEQ ID NO: 1255 |
| 4-5099507-6 | SEQ ID NO: 199 | SEQ ID NO: 1256 |
| 4-4669689-415 | SEQ ID NO: 200 | SEQ ID NO: 1257 |
| 4-2805103-2 | SEQ ID NO: 201 | SEQ ID NO: 1258 |
| 4-8938700-2 | SEQ ID NO: 202 | SEQ ID NO: 1259 |
| 5-2538360-85 | SEQ ID NO: 203 | SEQ ID NO: 1260 |
| 5-1009969-217 | SEQ ID NO: 204 | SEQ ID NO: 1261 |
| 5-2813766-5 | SEQ ID NO: 205 | SEQ ID NO: 1262 |
| 5-549715-2 | SEQ ID NO: 206 | SEQ ID NO: 1263 |
| 5-110110-15 | SEQ ID NO: 207 | SEQ ID NO: 1264 |
| 5-1993009-8 | SEQ ID NO: 208 | SEQ ID NO: 1265 |
| 5-1735016-2 | SEQ ID NO: 209 | SEQ ID NO: 1266 |
| 5-1010853-156 | SEQ ID NO: 210 | SEQ ID NO: 1267 |
| 5-341922-2 | SEQ ID NO: 211 | SEQ ID NO: 1268 |
| 5-1900948-64 | SEQ ID NO: 212 | SEQ ID NO: 1269 |
| 5-81672-47 | SEQ ID NO: 213 | SEQ ID NO: 1270 |
| 5-2896693-3 | SEQ ID NO: 214 | SEQ ID NO: 1271 |
| 5-1033653-3 | SEQ ID NO: 215 | SEQ ID NO: 1272 |
| 5-205785-2 | SEQ ID NO: 216 | SEQ ID NO: 1273 |
| 5-2528191-66 | SEQ ID NO: 217 | SEQ ID NO: 1274 |
| 4-13181314-2 | SEQ ID NO: 218 | SEQ ID NO: 1275 |
| 4-8643638-15 | SEQ ID NO: 219 | SEQ ID NO: 1276 |
| 4-3351570-3 | SEQ ID NO: 220 | SEQ ID NO: 1277 |
| 4-3529447-4 | SEQ ID NO: 221 | SEQ ID NO: 1278 |
| 4-5882402-2 | SEQ ID NO: 222 | SEQ ID NO: 1279 |
| 4-9634958-3 | SEQ ID NO: 223 | SEQ ID NO: 1280 |
| 4-7004900-2 | SEQ ID NO: 224 | SEQ ID NO: 1281 |
| 4-9855676-3 | SEQ ID NO: 225 | SEQ ID NO: 1282 |
| 4-4612853-137 | SEQ ID NO: 226 | SEQ ID NO: 1283 |
| 4-4218110-19 | SEQ ID NO: 227 | SEQ ID NO: 1284 |
| 4-5081457-2 | SEQ ID NO: 228 | SEQ ID NO: 1285 |
| 4-8551389-14 | SEQ ID NO: 229 | SEQ ID NO: 1286 |
| 4-7288090-3 | SEQ ID NO: 230 | SEQ ID NO: 1287 |
| 4-5376326-10 | SEQ ID NO: 231 | SEQ ID NO: 1288 |
| 4-3394499-7 | SEQ ID NO: 232 | SEQ ID NO: 1289 |
| 4-5833422-2 | SEQ ID NO: 233 | SEQ ID NO: 1290 |
| 4-9291002-4 | SEQ ID NO: 234 | SEQ ID NO: 1291 |
| 4-5986046-8 | SEQ ID NO: 235 | SEQ ID NO: 1292 |
| 4-13991477-4 | SEQ ID NO: 236 | SEQ ID NO: 1293 |
| 4-6074765-7 | SEQ ID NO: 237 | SEQ ID NO: 1294 |
| 4-3593440-23 | SEQ ID NO: 238 | SEQ ID NO: 1295 |
| 4-2473437-11 | SEQ ID NO: 239 | SEQ ID NO: 1296 |
| 4-9700858-3 | SEQ ID NO: 240 | SEQ ID NO: 1297 |
| 4-1750311-445 | SEQ ID NO: 241 | SEQ ID NO: 1298 |
| 4-2094988-13 | SEQ ID NO: 242 | SEQ ID NO: 1299 |
| 4-4676422-12 | SEQ ID NO: 243 | SEQ ID NO: 1300 |
| 4-143351-3 | SEQ ID NO: 244 | SEQ ID NO: 1301 |
| 4-2083246-3 | SEQ ID NO: 245 | SEQ ID NO: 1302 |
| 4-1715713-2 | SEQ ID NO: 246 | SEQ ID NO: 1303 |
| 4-7051442-2 | SEQ ID NO: 247 | SEQ ID NO: 1304 |
| 4-5961115-4 | SEQ ID NO: 248 | SEQ ID NO: 1305 |
| 4-139696-5 | SEQ ID NO: 249 | SEQ ID NO: 1306 |
| 4-9295701-2 | SEQ ID NO: 250 | SEQ ID NO: 1307 |
| 4-3233807-2 | SEQ ID NO: 251 | SEQ ID NO: 1308 |
| 4-710183-4 | SEQ ID NO: 252 | SEQ ID NO: 1309 |
| 4-12800385-2 | SEQ ID NO: 253 | SEQ ID NO: 1310 |
| 4-2420002-3 | SEQ ID NO: 254 | SEQ ID NO: 1311 |
| 4-824260-2 | SEQ ID NO: 255 | SEQ ID NO: 1312 |
| 4-857253-4 | SEQ ID NO: 256 | SEQ ID NO: 1313 |
| 4-4084959-2 | SEQ ID NO: 257 | SEQ ID NO: 1314 |
| 4-1267404-2 | SEQ ID NO: 258 | SEQ ID NO: 1315 |
| 4-2105342-2 | SEQ ID NO: 259 | SEQ ID NO: 1316 |
| 4-9761654-2 | SEQ ID NO: 260 | SEQ ID NO: 1317 |
| 4-4335814-12 | SEQ ID NO: 261 | SEQ ID NO: 1318 |
| 4-12814759-2 | SEQ ID NO: 262 | SEQ ID NO: 1319 |
| 4-4609075-3 | SEQ ID NO: 263 | SEQ ID NO: 1320 |
| 4-3012497-5 | SEQ ID NO: 264 | SEQ ID NO: 1321 |
| 4-5261934-28 | SEQ ID NO: 265 | SEQ ID NO: 1322 |
| 4-13767854-2 | SEQ ID NO: 266 | SEQ ID NO: 1323 |
| 4-814525-2 | SEQ ID NO: 267 | SEQ ID NO: 1324 |
| 4-2344236-3 | SEQ ID NO: 268 | SEQ ID NO: 1325 |
| 4-3649887-34 | SEQ ID NO: 269 | SEQ ID NO: 1326 |
| 4-3818143-3 | SEQ ID NO: 270 | SEQ ID NO: 1327 |
| 4-3737337-6 | SEQ ID NO: 271 | SEQ ID NO: 1328 |
| 4-3925360-5 | SEQ ID NO: 272 | SEQ ID NO: 1329 |
| 4-2941965-2 | SEQ ID NO: 273 | SEQ ID NO: 1330 |
| 4-10032717-2 | SEQ ID NO: 274 | SEQ ID NO: 1331 |
| 4-6016609-2 | SEQ ID NO: 275 | SEQ ID NO: 1332 |
| 4-12750542-4 | SEQ ID NO: 276 | SEQ ID NO: 1333 |
| 4-864572-15 | SEQ ID NO: 277 | SEQ ID NO: 1334 |
| 4-384864-2 | SEQ ID NO: 278 | SEQ ID NO: 1335 |
| 4-604064-2 | SEQ ID NO: 279 | SEQ ID NO: 1336 |
| 4-1957109-20 | SEQ ID NO: 280 | SEQ ID NO: 1337 |
| 4-8510753-2 | SEQ ID NO: 281 | SEQ ID NO: 1338 |
| 4-5242183-16 | SEQ ID NO: 282 | SEQ ID NO: 1339 |
| 4-6064593-4 | SEQ ID NO: 283 | SEQ ID NO: 1340 |
| 4-2372995-4 | SEQ ID NO: 284 | SEQ ID NO: 1341 |
| 4-1001836-3 | SEQ ID NO: 285 | SEQ ID NO: 1342 |
| 4-91907-6 | SEQ ID NO: 286 | SEQ ID NO: 1343 |
| 4-6480286-9 | SEQ ID NO: 287 | SEQ ID NO: 1344 |
| 4-4754376-4 | SEQ ID NO: 288 | SEQ ID NO: 1345 |
| 4-11888335-6 | SEQ ID NO: 289 | SEQ ID NO: 1346 |
| 4-6789020-4 | SEQ ID NO: 290 | SEQ ID NO: 1347 |
| 4-302306-2 | SEQ ID NO: 291 | SEQ ID NO: 1348 |
| 4-5325863-2 | SEQ ID NO: 292 | SEQ ID NO: 1349 |
| 4-4642331-98 | SEQ ID NO: 293 | SEQ ID NO: 1350 |
| 4-3583449-13 | SEQ ID NO: 294 | SEQ ID NO: 1351 |
| 4-3180289-2 | SEQ ID NO: 295 | SEQ ID NO: 1352 |
| 4-13570405-2 | SEQ ID NO: 296 | SEQ ID NO: 1353 |
| 4-6186665-2 | SEQ ID NO: 297 | SEQ ID NO: 1354 |
| 4-12819666-2 | SEQ ID NO: 298 | SEQ ID NO: 1355 |
| 4-1234606-2 | SEQ ID NO: 299 | SEQ ID NO: 1356 |
| 4-6227837-13 | SEQ ID NO: 300 | SEQ ID NO: 1357 |
| 4-12773807-5 | SEQ ID NO: 301 | SEQ ID NO: 1358 |
| 4-13040705-2 | SEQ ID NO: 302 | SEQ ID NO: 1359 |
| 4-10083057-2 | SEQ ID NO: 303 | SEQ ID NO: 1360 |
| 4-1923132-28 | SEQ ID NO: 304 | SEQ ID NO: 1361 |
| 4-11148717-5 | SEQ ID NO: 305 | SEQ ID NO: 1362 |
| 4-6192964-2 | SEQ ID NO: 306 | SEQ ID NO: 1363 |
| 4-4991813-2 | SEQ ID NO: 307 | SEQ ID NO: 1364 |
| 4-5275824-2 | SEQ ID NO: 308 | SEQ ID NO: 1365 |
| 4-11545721-3 | SEQ ID NO: 309 | SEQ ID NO: 1366 |
| 4-409235-20 | SEQ ID NO: 310 | SEQ ID NO: 1367 |
| 4-1755477-2 | SEQ ID NO: 311 | SEQ ID NO: 1368 |
| 4-2955780-7 | SEQ ID NO: 312 | SEQ ID NO: 1369 |
| 4-1444120-2 | SEQ ID NO: 313 | SEQ ID NO: 1370 |
| 4-4650213-58 | SEQ ID NO: 314 | SEQ ID NO: 1371 |
| 4-2039149-2 | SEQ ID NO: 315 | SEQ ID NO: 1372 |
| 4-13019912-2 | SEQ ID NO: 316 | SEQ ID NO: 1373 |
| 4-3768935-16 | SEQ ID NO: 317 | SEQ ID NO: 1374 |
| 4-1219519-9 | SEQ ID NO: 318 | SEQ ID NO: 1375 |
| 4-11748771-5 | SEQ ID NO: 319 | SEQ ID NO: 1376 |
| 4-3727520-5 | SEQ ID NO: 320 | SEQ ID NO: 1377 |
| 4-3067663-5 | SEQ ID NO: 321 | SEQ ID NO: 1378 |
| 4-10110380-3 | SEQ ID NO: 322 | SEQ ID NO: 1379 |
| 4-9722169-2 | SEQ ID NO: 323 | SEQ ID NO: 1380 |
| 4-11642188-2 | SEQ ID NO: 324 | SEQ ID NO: 1381 |
| 4-6077766-2 | SEQ ID NO: 325 | SEQ ID NO: 1382 |
| 4-13997327-2 | SEQ ID NO: 326 | SEQ ID NO: 1383 |
| 4-246277-8 | SEQ ID NO: 327 | SEQ ID NO: 1384 |
| 4-8680685-2 | SEQ ID NO: 328 | SEQ ID NO: 1385 |
| 4-463361-4 | SEQ ID NO: 329 | SEQ ID NO: 1386 |
| 4-8604351-7 | SEQ ID NO: 330 | SEQ ID NO: 1387 |
| 4-4742374-7 | SEQ ID NO: 331 | SEQ ID NO: 1388 |
| 4-8704424-4 | SEQ ID NO: 332 | SEQ ID NO: 1389 |
| 4-1037296-2 | SEQ ID NO: 333 | SEQ ID NO: 1390 |
| 4-3505355-20 | SEQ ID NO: 334 | SEQ ID NO: 1391 |
| 4-887759-33 | SEQ ID NO: 335 | SEQ ID NO: 1392 |
| 4-5581221-2 | SEQ ID NO: 336 | SEQ ID NO: 1393 |
| 4-2235693-16 | SEQ ID NO: 337 | SEQ ID NO: 1394 |
| 4-1592082-2 | SEQ ID NO: 338 | SEQ ID NO: 1395 |
| 4-9325676-3 | SEQ ID NO: 339 | SEQ ID NO: 1396 |
| 4-2059129-3 | SEQ ID NO: 340 | SEQ ID NO: 1397 |
| 4-4027223-4 | SEQ ID NO: 341 | SEQ ID NO: 1398 |
| 4-9094581-9 | SEQ ID NO: 342 | SEQ ID NO: 1399 |
| 4-3291922-9 | SEQ ID NO: 343 | SEQ ID NO: 1400 |
| 4-1921786-5 | SEQ ID NO: 344 | SEQ ID NO: 1401 |
| 4-8496356-2 | SEQ ID NO: 345 | SEQ ID NO: 1402 |
| 4-11254889-8 | SEQ ID NO: 346 | SEQ ID NO: 1403 |
| 4-11203284-2 | SEQ ID NO: 347 | SEQ ID NO: 1404 |
| 4-6006398-2 | SEQ ID NO: 348 | SEQ ID NO: 1405 |
| 4-8540975-8 | SEQ ID NO: 349 | SEQ ID NO: 1406 |
| 4-13832531-2 | SEQ ID NO: 350 | SEQ ID NO: 1407 |
| 4-5521511-2 | SEQ ID NO: 351 | SEQ ID NO: 1408 |
| 4-11469871-2 | SEQ ID NO: 352 | SEQ ID NO: 1409 |
| 4-4104768-2 | SEQ ID NO: 353 | SEQ ID NO: 1410 |
| 4-2899623-15 | SEQ ID NO: 354 | SEQ ID NO: 1411 |
| 4-4608783-2 | SEQ ID NO: 355 | SEQ ID NO: 1412 |
| 4-8554098-2 | SEQ ID NO: 356 | SEQ ID NO: 1413 |
| 4-5828627-2 | SEQ ID NO: 357 | SEQ ID NO: 1414 |
| 4-12069155-2 | SEQ ID NO: 358 | SEQ ID NO: 1415 |
| 4-3530394-14 | SEQ ID NO: 359 | SEQ ID NO: 1416 |
| 4-4958693-2 | SEQ ID NO: 360 | SEQ ID NO: 1417 |
| 4-4413884-3 | SEQ ID NO: 361 | SEQ ID NO: 1418 |
| 4-3691216-5 | SEQ ID NO: 362 | SEQ ID NO: 1419 |
| 4-13355128-2 | SEQ ID NO: 363 | SEQ ID NO: 1420 |
| 4-4975142-8 | SEQ ID NO: 364 | SEQ ID NO: 1421 |
| 4-4827207-2 | SEQ ID NO: 365 | SEQ ID NO: 1422 |
| 4-3592965-2 | SEQ ID NO: 366 | SEQ ID NO: 1423 |
| 4-4469229-2 | SEQ ID NO: 367 | SEQ ID NO: 1424 |
| 4-7656645-2 | SEQ ID NO: 368 | SEQ ID NO: 1425 |
| 4-8930464-3 | SEQ ID NO: 369 | SEQ ID NO: 1426 |
| 4-6114869-2 | SEQ ID NO: 370 | SEQ ID NO: 1427 |
| 4-12357012-2 | SEQ ID NO: 371 | SEQ ID NO: 1428 |
| 4-4956154-3 | SEQ ID NO: 372 | SEQ ID NO: 1429 |
| 4-309472-5 | SEQ ID NO: 373 | SEQ ID NO: 1430 |
| 4-5566103-2 | SEQ ID NO: 374 | SEQ ID NO: 1431 |
| 4-6966458-2 | SEQ ID NO: 375 | SEQ ID NO: 1432 |
| 4-4762875-2 | SEQ ID NO: 376 | SEQ ID NO: 1433 |
| 4-5280394-23 | SEQ ID NO: 377 | SEQ ID NO: 1434 |
| 4-12280870-2 | SEQ ID NO: 378 | SEQ ID NO: 1435 |
| 4-6387478-2 | SEQ ID NO: 379 | SEQ ID NO: 1436 |
| 4-4140467-3 | SEQ ID NO: 380 | SEQ ID NO: 1437 |
| 4-8491270-3 | SEQ ID NO: 381 | SEQ ID NO: 1438 |
| 4-857327-9 | SEQ ID NO: 382 | SEQ ID NO: 1439 |
| 4-1177872-2 | SEQ ID NO: 383 | SEQ ID NO: 1440 |
| 4-2051185-5 | SEQ ID NO: 384 | SEQ ID NO: 1441 |
| 4-12892690-2 | SEQ ID NO: 385 | SEQ ID NO: 1442 |
| 4-3633881-17 | SEQ ID NO: 386 | SEQ ID NO: 1443 |
| 4-12820097-3 | SEQ ID NO: 387 | SEQ ID NO: 1444 |
| 4-12985944-3 | SEQ ID NO: 388 | SEQ ID NO: 1445 |
| 4-11458388-2 | SEQ ID NO: 389 | SEQ ID NO: 1446 |
| 4-11201525-2 | SEQ ID NO: 390 | SEQ ID NO: 1447 |
| 4-803066-2 | SEQ ID NO: 391 | SEQ ID NO: 1448 |
| 4-2026448-3 | SEQ ID NO: 392 | SEQ ID NO: 1449 |
| 4-8643669-4 | SEQ ID NO: 393 | SEQ ID NO: 1450 |
| 4-1841440-2 | SEQ ID NO: 394 | SEQ ID NO: 1451 |
| 4-14202295-2 | SEQ ID NO: 395 | SEQ ID NO: 1452 |
| 4-5274756-2 | SEQ ID NO: 396 | SEQ ID NO: 1453 |
| 4-1813655-18 | SEQ ID NO: 397 | SEQ ID NO: 1454 |
| 4-3910110-2 | SEQ ID NO: 398 | SEQ ID NO: 1455 |
| 4-13064342-3 | SEQ ID NO: 399 | SEQ ID NO: 1456 |
| 4-12755556-3 | SEQ ID NO: 400 | SEQ ID NO: 1457 |
| 4-458984-4 | SEQ ID NO: 401 | SEQ ID NO: 1458 |
| 4-9065335-3 | SEQ ID NO: 402 | SEQ ID NO: 1459 |
| 4-2055720-4 | SEQ ID NO: 403 | SEQ ID NO: 1460 |
| 4-12806037-2 | SEQ ID NO: 404 | SEQ ID NO: 1461 |
| 4-3542860-8 | SEQ ID NO: 405 | SEQ ID NO: 1462 |
| 4-3549132-36 | SEQ ID NO: 406 | SEQ ID NO: 1463 |
| 4-5785557-5 | SEQ ID NO: 407 | SEQ ID NO: 1464 |
| 4-2619438-3 | SEQ ID NO: 408 | SEQ ID NO: 1465 |
| 4-55403-24 | SEQ ID NO: 409 | SEQ ID NO: 1466 |
| 4-8592714-2 | SEQ ID NO: 410 | SEQ ID NO: 1467 |
| 4-1822841-8 | SEQ ID NO: 411 | SEQ ID NO: 1468 |
| 4-4705102-3 | SEQ ID NO: 412 | SEQ ID NO: 1469 |
| 4-3571266-27 | SEQ ID NO: 413 | SEQ ID NO: 1470 |
| 4-2356644-50 | SEQ ID NO: 414 | SEQ ID NO: 1471 |
| 4-3623627-83 | SEQ ID NO: 415 | SEQ ID NO: 1472 |
| 4-104794-22 | SEQ ID NO: 416 | SEQ ID NO: 1473 |
| 4-3849839-2 | SEQ ID NO: 417 | SEQ ID NO: 1474 |
| 4-4955760-5 | SEQ ID NO: 418 | SEQ ID NO: 1475 |
| 4-9684484-2 | SEQ ID NO: 419 | SEQ ID NO: 1476 |
| 4-2229631-38 | SEQ ID NO: 420 | SEQ ID NO: 1477 |
| 4-12800770-2 | SEQ ID NO: 421 | SEQ ID NO: 1478 |
| 4-379824-29 | SEQ ID NO: 422 | SEQ ID NO: 1479 |
| 4-1814560-26 | SEQ ID NO: 423 | SEQ ID NO: 1480 |
| 4-11137042-2 | SEQ ID NO: 424 | SEQ ID NO: 1481 |
| 4-2837615-2 | SEQ ID NO: 425 | SEQ ID NO: 1482 |
| 4-5301672-16 | SEQ ID NO: 426 | SEQ ID NO: 1483 |
| 4-4662850-41 | SEQ ID NO: 427 | SEQ ID NO: 1484 |
| 4-4367876-2 | SEQ ID NO: 428 | SEQ ID NO: 1485 |
| 4-3655837-28 | SEQ ID NO: 429 | SEQ ID NO: 1486 |
| 4-4554413-2 | SEQ ID NO: 430 | SEQ ID NO: 1487 |
| 4-6928846-2 | SEQ ID NO: 431 | SEQ ID NO: 1488 |
| 4-4850546-4 | SEQ ID NO: 432 | SEQ ID NO: 1489 |
| 4-9271814-2 | SEQ ID NO: 433 | SEQ ID NO: 1490 |
| 4-930187-3 | SEQ ID NO: 434 | SEQ ID NO: 1491 |
| 4-1891607-18 | SEQ ID NO: 435 | SEQ ID NO: 1492 |
| 4-8759327-2 | SEQ ID NO: 436 | SEQ ID NO: 1493 |
| 4-11671362-3 | SEQ ID NO: 437 | SEQ ID NO: 1494 |
| 4-9453382-4 | SEQ ID NO: 438 | SEQ ID NO: 1495 |
| 4-12010665-2 | SEQ ID NO: 439 | SEQ ID NO: 1496 |
| 4-8541709-2 | SEQ ID NO: 440 | SEQ ID NO: 1497 |
| 4-13208089-2 | SEQ ID NO: 441 | SEQ ID NO: 1498 |
| 4-3691991-2 | SEQ ID NO: 442 | SEQ ID NO: 1499 |
| 4-14340382-2 | SEQ ID NO: 443 | SEQ ID NO: 1500 |
| 4-9575068-2 | SEQ ID NO: 444 | SEQ ID NO: 1501 |
| 4-6345686-2 | SEQ ID NO: 445 | SEQ ID NO: 1502 |
| 4-4767859-4 | SEQ ID NO: 446 | SEQ ID NO: 1503 |
| 4-6083486-4 | SEQ ID NO: 447 | SEQ ID NO: 1504 |
| 4-6915682-2 | SEQ ID NO: 448 | SEQ ID NO: 1505 |
| 4-12763665-5 | SEQ ID NO: 449 | SEQ ID NO: 1506 |
| 4-5316151-3 | SEQ ID NO: 450 | SEQ ID NO: 1507 |
| 4-1457754-2 | SEQ ID NO: 451 | SEQ ID NO: 1508 |
| 4-13080345-3 | SEQ ID NO: 452 | SEQ ID NO: 1509 |
| 4-5562115-2 | SEQ ID NO: 453 | SEQ ID NO: 1510 |
| 4-8491269-2 | SEQ ID NO: 454 | SEQ ID NO: 1511 |
| 4-306028-2 | SEQ ID NO: 455 | SEQ ID NO: 1512 |
| 4-8928663-4 | SEQ ID NO: 456 | SEQ ID NO: 1513 |
| 4-8887332-2 | SEQ ID NO: 457 | SEQ ID NO: 1514 |
| 4-5358098-2 | SEQ ID NO: 458 | SEQ ID NO: 1515 |
| 4-8778218-2 | SEQ ID NO: 459 | SEQ ID NO: 1516 |
| 4-6074750-2 | SEQ ID NO: 460 | SEQ ID NO: 1517 |
| 4-4858767-9 | SEQ ID NO: 461 | SEQ ID NO: 1518 |
| 4-2057069-3 | SEQ ID NO: 462 | SEQ ID NO: 1519 |
| 4-7559770-4 | SEQ ID NO: 463 | SEQ ID NO: 1520 |
| 4-5256250-2 | SEQ ID NO: 464 | SEQ ID NO: 1521 |
| 4-3342406-2 | SEQ ID NO: 465 | SEQ ID NO: 1522 |
| 4-1434290-5 | SEQ ID NO: 466 | SEQ ID NO: 1523 |
| 4-13228696-2 | SEQ ID NO: 467 | SEQ ID NO: 1524 |
| 4-4233749-2 | SEQ ID NO: 468 | SEQ ID NO: 1525 |
| 4-5434139-5 | SEQ ID NO: 469 | SEQ ID NO: 1526 |
| 4-11515477-5 | SEQ ID NO: 470 | SEQ ID NO: 1527 |
| 4-6198566-2 | SEQ ID NO: 471 | SEQ ID NO: 1528 |
| 4-41791-3 | SEQ ID NO: 472 | SEQ ID NO: 1529 |
| 4-4828189-2 | SEQ ID NO: 473 | SEQ ID NO: 1530 |
| 4-5732731-2 | SEQ ID NO: 474 | SEQ ID NO: 1531 |
| 4-2871272-5 | SEQ ID NO: 475 | SEQ ID NO: 1532 |
| 4-5187317-2 | SEQ ID NO: 476 | SEQ ID NO: 1533 |
| 4-3174909-2 | SEQ ID NO: 477 | SEQ ID NO: 1534 |
| 4-3655165-4 | SEQ ID NO: 478 | SEQ ID NO: 1535 |
| 4-317502-2 | SEQ ID NO: 479 | SEQ ID NO: 1536 |
| 4-11435519-2 | SEQ ID NO: 480 | SEQ ID NO: 1537 |
| 4-3075969-12 | SEQ ID NO: 481 | SEQ ID NO: 1538 |
| 4-12753692-2 | SEQ ID NO: 482 | SEQ ID NO: 1539 |
| 4-3639656-12 | SEQ ID NO: 483 | SEQ ID NO: 1540 |
| 4-5390580-23 | SEQ ID NO: 484 | SEQ ID NO: 1541 |
| 4-11456736-4 | SEQ ID NO: 485 | SEQ ID NO: 1542 |
| 4-6888851-2 | SEQ ID NO: 486 | SEQ ID NO: 1543 |
| 4-9503046-2 | SEQ ID NO: 487 | SEQ ID NO: 1544 |
| 4-9425129-2 | SEQ ID NO: 488 | SEQ ID NO: 1545 |
| 4-2654006-2 | SEQ ID NO: 489 | SEQ ID NO: 1546 |
| 4-4818200-13 | SEQ ID NO: 490 | SEQ ID NO: 1547 |
| 4-4332759-2 | SEQ ID NO: 491 | SEQ ID NO: 1548 |
| 4-2002208-28 | SEQ ID NO: 492 | SEQ ID NO: 1549 |
| 4-1861724-2 | SEQ ID NO: 493 | SEQ ID NO: 1550 |
| 4-6151797-2 | SEQ ID NO: 494 | SEQ ID NO: 1551 |
| 4-12889516-9 | SEQ ID NO: 495 | SEQ ID NO: 1552 |
| 4-37618-4 | SEQ ID NO: 496 | SEQ ID NO: 1553 |
| 4-4138911-26 | SEQ ID NO: 497 | SEQ ID NO: 1554 |
| 4-5172072-2 | SEQ ID NO: 498 | SEQ ID NO: 1555 |
| 4-4474995-7 | SEQ ID NO: 499 | SEQ ID NO: 1556 |
| 4-2910890-20 | SEQ ID NO: 500 | SEQ ID NO: 1557 |
| 4-8553413-4 | SEQ ID NO: 501 | SEQ ID NO: 1558 |
| 4-6202770-2 | SEQ ID NO: 502 | SEQ ID NO: 1559 |
| 4-1204174-2 | SEQ ID NO: 503 | SEQ ID NO: 1560 |
| 4-6189913-2 | SEQ ID NO: 504 | SEQ ID NO: 1561 |
| 4-3820419-14 | SEQ ID NO: 505 | SEQ ID NO: 1562 |
| 4-3030848-2 | SEQ ID NO: 506 | SEQ ID NO: 1563 |
| 4-2652596-3 | SEQ ID NO: 507 | SEQ ID NO: 1564 |
| 4-7652765-2 | SEQ ID NO: 508 | SEQ ID NO: 1565 |
| 4-1511825-2 | SEQ ID NO: 509 | SEQ ID NO: 1566 |
| 4-495325-2 | SEQ ID NO: 510 | SEQ ID NO: 1567 |
| 4-4790144-2 | SEQ ID NO: 511 | SEQ ID NO: 1568 |
| 4-9531730-2 | SEQ ID NO: 512 | SEQ ID NO: 1569 |
| 4-10604235-2 | SEQ ID NO: 513 | SEQ ID NO: 1570 |
| 4-457480-5 | SEQ ID NO: 514 | SEQ ID NO: 1571 |
| 4-2084932-13 | SEQ ID NO: 515 | SEQ ID NO: 1572 |
| 4-6256390-2 | SEQ ID NO: 516 | SEQ ID NO: 1573 |
| 4-3362597-2 | SEQ ID NO: 517 | SEQ ID NO: 1574 |
| 4-4231535-3 | SEQ ID NO: 518 | SEQ ID NO: 1575 |
| 4-4764333-4 | SEQ ID NO: 519 | SEQ ID NO: 1576 |
| 4-14846-3 | SEQ ID NO: 520 | SEQ ID NO: 1577 |
| 4-656941-3 | SEQ ID NO: 521 | SEQ ID NO: 1578 |
| 4-13200123-2 | SEQ ID NO: 522 | SEQ ID NO: 1579 |
| 4-5342212-5 | SEQ ID NO: 523 | SEQ ID NO: 1580 |
| 4-9238016-3 | SEQ ID NO: 524 | SEQ ID NO: 1581 |
| 4-813594-27 | SEQ ID NO: 525 | SEQ ID NO: 1582 |
| 4-5402398-2 | SEQ ID NO: 526 | SEQ ID NO: 1583 |
| 4-4648528-7 | SEQ ID NO: 527 | SEQ ID NO: 1584 |
| 4-5706894-2 | SEQ ID NO: 528 | SEQ ID NO: 1585 |
| 4-2017044-25 | SEQ ID NO: 529 | SEQ ID NO: 1586 |
| 4-3610202-9 | SEQ ID NO: 530 | SEQ ID NO: 1587 |
| 4-1409229-2 | SEQ ID NO: 531 | SEQ ID NO: 1588 |
| 4-523698-5 | SEQ ID NO: 532 | SEQ ID NO: 1589 |
| 4-9160654-3 | SEQ ID NO: 533 | SEQ ID NO: 1590 |
| 4-7013429-3 | SEQ ID NO: 534 | SEQ ID NO: 1591 |
| 4-4922921-8 | SEQ ID NO: 535 | SEQ ID NO: 1592 |
| 4-589059-2 | SEQ ID NO: 536 | SEQ ID NO: 1593 |
| 4-1012998-3 | SEQ ID NO: 537 | SEQ ID NO: 1594 |
| 4-6191771-7 | SEQ ID NO: 538 | SEQ ID NO: 1595 |
| 4-947738-9 | SEQ ID NO: 539 | SEQ ID NO: 1596 |
| 4-10347787-2 | SEQ ID NO: 540 | SEQ ID NO: 1597 |
| 4-5487145-2 | SEQ ID NO: 541 | SEQ ID NO: 1598 |
| 4-1436238-5 | SEQ ID NO: 542 | SEQ ID NO: 1599 |
| 4-6061062-2 | SEQ ID NO: 543 | SEQ ID NO: 1600 |
| 4-3715847-8 | SEQ ID NO: 544 | SEQ ID NO: 1601 |
| 4-4855542-6 | SEQ ID NO: 545 | SEQ ID NO: 1602 |
| 4-10601470-2 | SEQ ID NO: 546 | SEQ ID NO: 1603 |
| 4-648180-2 | SEQ ID NO: 547 | SEQ ID NO: 1604 |
| 4-1924630-2 | SEQ ID NO: 548 | SEQ ID NO: 1605 |
| 4-11226934-4 | SEQ ID NO: 549 | SEQ ID NO: 1606 |
| 4-6085115-2 | SEQ ID NO: 550 | SEQ ID NO: 1607 |
| 4-4413708-8 | SEQ ID NO: 551 | SEQ ID NO: 1608 |
| 4-2164399-17 | SEQ ID NO: 552 | SEQ ID NO: 1609 |
| 4-2840415-12 | SEQ ID NO: 553 | SEQ ID NO: 1610 |
| 4-10011522-2 | SEQ ID NO: 554 | SEQ ID NO: 1611 |
| 4-2727434-28 | SEQ ID NO: 555 | SEQ ID NO: 1612 |
| 4-11302862-2 | SEQ ID NO: 556 | SEQ ID NO: 1613 |
| 4-11848302-3 | SEQ ID NO: 557 | SEQ ID NO: 1614 |
| 4-1915025-53 | SEQ ID NO: 558 | SEQ ID NO: 1615 |
| 4-1624090-2 | SEQ ID NO: 559 | SEQ ID NO: 1616 |
| 4-7676197-2 | SEQ ID NO: 560 | SEQ ID NO: 1617 |
| 4-2687435-2 | SEQ ID NO: 561 | SEQ ID NO: 1618 |
| 4-3095685-2 | SEQ ID NO: 562 | SEQ ID NO: 1619 |
| 4-8069674-2 | SEQ ID NO: 563 | SEQ ID NO: 1620 |
| 4-5376323-2 | SEQ ID NO: 564 | SEQ ID NO: 1621 |
| 4-9558086-2 | SEQ ID NO: 565 | SEQ ID NO: 1622 |
| 4-14175261-2 | SEQ ID NO: 566 | SEQ ID NO: 1623 |
| 4-7338078-2 | SEQ ID NO: 567 | SEQ ID NO: 1624 |
| 4-8527490-11 | SEQ ID NO: 568 | SEQ ID NO: 1625 |
| 4-161300-3 | SEQ ID NO: 569 | SEQ ID NO: 1626 |
| 4-8993715-2 | SEQ ID NO: 570 | SEQ ID NO: 1627 |
| 4-1616718-6 | SEQ ID NO: 571 | SEQ ID NO: 1628 |
| 4-11522705-3 | SEQ ID NO: 572 | SEQ ID NO: 1629 |
| 4-3242990-2 | SEQ ID NO: 573 | SEQ ID NO: 1630 |
| 4-8666515-2 | SEQ ID NO: 574 | SEQ ID NO: 1631 |
| 4-12796552-7 | SEQ ID NO: 575 | SEQ ID NO: 1632 |
| 4-2625622-5 | SEQ ID NO: 576 | SEQ ID NO: 1633 |
| 4-4155587-2 | SEQ ID NO: 577 | SEQ ID NO: 1634 |
| 4-13156013-2 | SEQ ID NO: 578 | SEQ ID NO: 1635 |
| 4-13580555-3 | SEQ ID NO: 579 | SEQ ID NO: 1636 |
| 4-96616-15 | SEQ ID NO: 580 | SEQ ID NO: 1637 |
| 4-5041579-11 | SEQ ID NO: 581 | SEQ ID NO: 1638 |
| 4-6517845-3 | SEQ ID NO: 582 | SEQ ID NO: 1639 |
| 4-6774106-2 | SEQ ID NO: 583 | SEQ ID NO: 1640 |
| 4-6450274-5 | SEQ ID NO: 584 | SEQ ID NO: 1641 |
| 4-8512678-2 | SEQ ID NO: 585 | SEQ ID NO: 1642 |
| 4-8597863-2 | SEQ ID NO: 586 | SEQ ID NO: 1643 |
| 4-4637162-2 | SEQ ID NO: 587 | SEQ ID NO: 1644 |
| 4-10253885-2 | SEQ ID NO: 588 | SEQ ID NO: 1645 |
| 4-243065-14 | SEQ ID NO: 589 | SEQ ID NO: 1646 |
| 4-11380738-2 | SEQ ID NO: 590 | SEQ ID NO: 1647 |
| 4-14075705-2 | SEQ ID NO: 591 | SEQ ID NO: 1648 |
| 4-5967379-2 | SEQ ID NO: 592 | SEQ ID NO: 1649 |
| 4-12419326-3 | SEQ ID NO: 593 | SEQ ID NO: 1650 |
| 4-13091749-2 | SEQ ID NO: 594 | SEQ ID NO: 1651 |
| 4-195248-11 | SEQ ID NO: 595 | SEQ ID NO: 1652 |
| 4-4786709-2 | SEQ ID NO: 596 | SEQ ID NO: 1653 |
| 4-5303454-3 | SEQ ID NO: 597 | SEQ ID NO: 1654 |
| 4-2230237-17 | SEQ ID NO: 598 | SEQ ID NO: 1655 |
| 4-11964353-3 | SEQ ID NO: 599 | SEQ ID NO: 1656 |
| 4-4788889-3 | SEQ ID NO: 600 | SEQ ID NO: 1657 |
| 4-6964778-2 | SEQ ID NO: 601 | SEQ ID NO: 1658 |
| 4-6896134-2 | SEQ ID NO: 602 | SEQ ID NO: 1659 |
| 4-6087863-14 | SEQ ID NO: 603 | SEQ ID NO: 1660 |
| 4-10026563-2 | SEQ ID NO: 604 | SEQ ID NO: 1661 |
| 4-5539032-9 | SEQ ID NO: 605 | SEQ ID NO: 1662 |
| 4-9690250-4 | SEQ ID NO: 606 | SEQ ID NO: 1663 |
| 4-8210248-2 | SEQ ID NO: 607 | SEQ ID NO: 1664 |
| 4-3732589-19 | SEQ ID NO: 608 | SEQ ID NO: 1665 |
| 4-2964718-6 | SEQ ID NO: 609 | SEQ ID NO: 1666 |
| 4-3813395-8 | SEQ ID NO: 610 | SEQ ID NO: 1667 |
| 4-247424-2 | SEQ ID NO: 611 | SEQ ID NO: 1668 |
| 4-9014657-2 | SEQ ID NO: 612 | SEQ ID NO: 1669 |
| 4-2775294-5 | SEQ ID NO: 613 | SEQ ID NO: 1670 |
| 4-10464607-2 | SEQ ID NO: 614 | SEQ ID NO: 1671 |
| 4-13175347-2 | SEQ ID NO: 615 | SEQ ID NO: 1672 |
| 4-11511701-2 | SEQ ID NO: 616 | SEQ ID NO: 1673 |
| 4-11616893-2 | SEQ ID NO: 617 | SEQ ID NO: 1674 |
| 4-12948939-3 | SEQ ID NO: 618 | SEQ ID NO: 1675 |
| 4-13483989-2 | SEQ ID NO: 619 | SEQ ID NO: 1676 |
| 4-8506183-2 | SEQ ID NO: 620 | SEQ ID NO: 1677 |
| 4-6483216-2 | SEQ ID NO: 621 | SEQ ID NO: 1678 |
| 4-6131305-7 | SEQ ID NO: 622 | SEQ ID NO: 1679 |
| 4-9581201-2 | SEQ ID NO: 623 | SEQ ID NO: 1680 |
| 4-3091012-2 | SEQ ID NO: 624 | SEQ ID NO: 1681 |
| 4-6809018-2 | SEQ ID NO: 625 | SEQ ID NO: 1682 |
| 4-1143729-2 | SEQ ID NO: 626 | SEQ ID NO: 1683 |
| 4-5018770-2 | SEQ ID NO: 627 | SEQ ID NO: 1684 |
| 4-2082086-2 | SEQ ID NO: 628 | SEQ ID NO: 1685 |
| 4-558751-2 | SEQ ID NO: 629 | SEQ ID NO: 1686 |
| 4-6665135-2 | SEQ ID NO: 630 | SEQ ID NO: 1687 |
| 4-3651780-5 | SEQ ID NO: 631 | SEQ ID NO: 1688 |
| 4-11347961-2 | SEQ ID NO: 632 | SEQ ID NO: 1689 |
| 4-2010097-3 | SEQ ID NO: 633 | SEQ ID NO: 1690 |
| 4-9356905-3 | SEQ ID NO: 634 | SEQ ID NO: 1691 |
| 4-161517-6 | SEQ ID NO: 635 | SEQ ID NO: 1692 |
| 4-9005681-3 | SEQ ID NO: 636 | SEQ ID NO: 1693 |
| 4-349495-2 | SEQ ID NO: 637 | SEQ ID NO: 1694 |
| 4-2279246-4 | SEQ ID NO: 638 | SEQ ID NO: 1695 |
| 4-5718875-2 | SEQ ID NO: 639 | SEQ ID NO: 1696 |
| 4-9202788-3 | SEQ ID NO: 640 | SEQ ID NO: 1697 |
| 4-11932452-3 | SEQ ID NO: 641 | SEQ ID NO: 1698 |
| 4-8719052-6 | SEQ ID NO: 642 | SEQ ID NO: 1699 |
| 4-13589827-2 | SEQ ID NO: 643 | SEQ ID NO: 1700 |
| 4-1583398-6 | SEQ ID NO: 644 | SEQ ID NO: 1701 |
| 4-5611265-2 | SEQ ID NO: 645 | SEQ ID NO: 1702 |
| 4-11418307-2 | SEQ ID NO: 646 | SEQ ID NO: 1703 |
| 4-4482198-2 | SEQ ID NO: 647 | SEQ ID NO: 1704 |
| 4-3789491-2 | SEQ ID NO: 648 | SEQ ID NO: 1705 |
| 4-5795560-2 | SEQ ID NO: 649 | SEQ ID NO: 1706 |
| 4-712744-2 | SEQ ID NO: 650 | SEQ ID NO: 1707 |
| 4-2623643-2 | SEQ ID NO: 651 | SEQ ID NO: 1708 |
| 4-2032915-2 | SEQ ID NO: 652 | SEQ ID NO: 1709 |
| 4-10098193-2 | SEQ ID NO: 653 | SEQ ID NO: 1710 |
| 4-7383866-2 | SEQ ID NO: 654 | SEQ ID NO: 1711 |
| 4-5013350-2 | SEQ ID NO: 655 | SEQ ID NO: 1712 |
| 4-4720581-3 | SEQ ID NO: 656 | SEQ ID NO: 1713 |
| 4-9991639-2 | SEQ ID NO: 657 | SEQ ID NO: 1714 |
| 4-106394-2 | SEQ ID NO: 658 | SEQ ID NO: 1715 |
| 4-3157200-4 | SEQ ID NO: 659 | SEQ ID NO: 1716 |
| 4-3576581-2 | SEQ ID NO: 660 | SEQ ID NO: 1717 |
| 4-6583593-2 | SEQ ID NO: 661 | SEQ ID NO: 1718 |
| 4-9667098-4 | SEQ ID NO: 662 | SEQ ID NO: 1719 |
| 4-4626312-4 | SEQ ID NO: 663 | SEQ ID NO: 1720 |
| 4-8712204-2 | SEQ ID NO: 664 | SEQ ID NO: 1721 |
| 4-4414504-3 | SEQ ID NO: 665 | SEQ ID NO: 1722 |
| 4-7023003-3 | SEQ ID NO: 666 | SEQ ID NO: 1723 |
| 4-10147520-2 | SEQ ID NO: 667 | SEQ ID NO: 1724 |
| 4-147641-2 | SEQ ID NO: 668 | SEQ ID NO: 1725 |
| 4-2618723-2 | SEQ ID NO: 669 | SEQ ID NO: 1726 |
| 4-4653676-2 | SEQ ID NO: 670 | SEQ ID NO: 1727 |
| 4-13100536-2 | SEQ ID NO: 671 | SEQ ID NO: 1728 |
| 4-570180-3 | SEQ ID NO: 672 | SEQ ID NO: 1729 |
| 4-6116434-2 | SEQ ID NO: 673 | SEQ ID NO: 1730 |
| 4-3371101-3 | SEQ ID NO: 674 | SEQ ID NO: 1731 |
| 4-6521725-7 | SEQ ID NO: 675 | SEQ ID NO: 1732 |
| 4-11718170-2 | SEQ ID NO: 676 | SEQ ID NO: 1733 |
| 4-11159205-2 | SEQ ID NO: 677 | SEQ ID NO: 1734 |
| 4-13407986-2 | SEQ ID NO: 678 | SEQ ID NO: 1735 |
| 4-4292125-2 | SEQ ID NO: 679 | SEQ ID NO: 1736 |
| 4-6268471-3 | SEQ ID NO: 680 | SEQ ID NO: 1737 |
| 4-6367327-3 | SEQ ID NO: 681 | SEQ ID NO: 1738 |
| 4-5278922-5 | SEQ ID NO: 682 | SEQ ID NO: 1739 |
| 4-1833015-3 | SEQ ID NO: 683 | SEQ ID NO: 1740 |
| 4-1432020-2 | SEQ ID NO: 684 | SEQ ID NO: 1741 |
| 4-6203153-3 | SEQ ID NO: 685 | SEQ ID NO: 1742 |
| 4-6488890-2 | SEQ ID NO: 686 | SEQ ID NO: 1743 |
| 4-2298899-2 | SEQ ID NO: 687 | SEQ ID NO: 1744 |
| 4-4695406-2 | SEQ ID NO: 688 | SEQ ID NO: 1745 |
| 4-2628870-2 | SEQ ID NO: 689 | SEQ ID NO: 1746 |
| 4-11708708-2 | SEQ ID NO: 690 | SEQ ID NO: 1747 |
| 4-1860788-3 | SEQ ID NO: 691 | SEQ ID NO: 1748 |
| 4-3229401-2 | SEQ ID NO: 692 | SEQ ID NO: 1749 |
| 4-4603394-3 | SEQ ID NO: 693 | SEQ ID NO: 1750 |
| 4-13507081-2 | SEQ ID NO: 694 | SEQ ID NO: 1751 |
| 4-1007788-2 | SEQ ID NO: 695 | SEQ ID NO: 1752 |
| 4-2730370-2 | SEQ ID NO: 696 | SEQ ID NO: 1753 |
| 4-2654962-3 | SEQ ID NO: 697 | SEQ ID NO: 1754 |
| 4-9042945-2 | SEQ ID NO: 698 | SEQ ID NO: 1755 |
| 4-3215161-2 | SEQ ID NO: 699 | SEQ ID NO: 1756 |
| 4-5104773-2 | SEQ ID NO: 700 | SEQ ID NO: 1757 |
| 4-11599478-2 | SEQ ID NO: 701 | SEQ ID NO: 1758 |
| 4-6539104-2 | SEQ ID NO: 702 | SEQ ID NO: 1759 |
| 4-6527299-4 | SEQ ID NO: 703 | SEQ ID NO: 1760 |
| 4-2136022-12 | SEQ ID NO: 704 | SEQ ID NO: 1761 |
| 4-5346916-2 | SEQ ID NO: 705 | SEQ ID NO: 1762 |
| 4-5503066-2 | SEQ ID NO: 706 | SEQ ID NO: 1763 |
| 4-2969169-2 | SEQ ID NO: 707 | SEQ ID NO: 1764 |
| 4-5422432-2 | SEQ ID NO: 708 | SEQ ID NO: 1765 |
| 4-7527833-2 | SEQ ID NO: 709 | SEQ ID NO: 1766 |
| 4-12911216-3 | SEQ ID NO: 710 | SEQ ID NO: 1767 |
| 4-8531908-2 | SEQ ID NO: 711 | SEQ ID NO: 1768 |
| 4-5390013-17 | SEQ ID NO: 712 | SEQ ID NO: 1769 |
| 4-2455525-2 | SEQ ID NO: 713 | SEQ ID NO: 1770 |
| 4-12923413-2 | SEQ ID NO: 714 | SEQ ID NO: 1771 |
| 4-7027184-2 | SEQ ID NO: 715 | SEQ ID NO: 1772 |
| 4-2997533-2 | SEQ ID NO: 716 | SEQ ID NO: 1773 |
| 4-14244201-2 | SEQ ID NO: 717 | SEQ ID NO: 1774 |
| 4-1363486-2 | SEQ ID NO: 718 | SEQ ID NO: 1775 |
| 4-11297702-2 | SEQ ID NO: 719 | SEQ ID NO: 1776 |
| 4-13318642-3 | SEQ ID NO: 720 | SEQ ID NO: 1777 |
| 4-13387560-2 | SEQ ID NO: 721 | SEQ ID NO: 1778 |
| 4-6984109-2 | SEQ ID NO: 722 | SEQ ID NO: 1779 |
| 4-12906253-4 | SEQ ID NO: 723 | SEQ ID NO: 1780 |
| 4-6875993-2 | SEQ ID NO: 724 | SEQ ID NO: 1781 |
| 4-2480865-2 | SEQ ID NO: 725 | SEQ ID NO: 1782 |
| 4-9107845-2 | SEQ ID NO: 726 | SEQ ID NO: 1783 |
| 4-12000519-2 | SEQ ID NO: 727 | SEQ ID NO: 1784 |
| 4-13983010-2 | SEQ ID NO: 728 | SEQ ID NO: 1785 |
| 4-2422760-2 | SEQ ID NO: 729 | SEQ ID NO: 1786 |
| 4-4158211-2 | SEQ ID NO: 730 | SEQ ID NO: 1787 |
| 4-2806535-5 | SEQ ID NO: 731 | SEQ ID NO: 1788 |
| 4-4828379-3 | SEQ ID NO: 732 | SEQ ID NO: 1789 |
| 4-11411601-3 | SEQ ID NO: 733 | SEQ ID NO: 1790 |
| 4-3635766-2 | SEQ ID NO: 734 | SEQ ID NO: 1791 |
| 4-8587973-2 | SEQ ID NO: 735 | SEQ ID NO: 1792 |
| 4-4865191-2 | SEQ ID NO: 736 | SEQ ID NO: 1793 |
| 4-6775722-2 | SEQ ID NO: 737 | SEQ ID NO: 1794 |
| 4-4855645-2 | SEQ ID NO: 738 | SEQ ID NO: 1795 |
| 4-6838997-2 | SEQ ID NO: 739 | SEQ ID NO: 1796 |
| 4-5331867-2 | SEQ ID NO: 740 | SEQ ID NO: 1797 |
| 4-6889938-2 | SEQ ID NO: 741 | SEQ ID NO: 1798 |
| 4-6769533-2 | SEQ ID NO: 742 | SEQ ID NO: 1799 |
| 4-3099528-2 | SEQ ID NO: 743 | SEQ ID NO: 1800 |
| 4-13291027-2 | SEQ ID NO: 744 | SEQ ID NO: 1801 |
| 4-11293195-2 | SEQ ID NO: 745 | SEQ ID NO: 1802 |
| 4-2618135-2 | SEQ ID NO: 746 | SEQ ID NO: 1803 |
| 4-12900160-2 | SEQ ID NO: 747 | SEQ ID NO: 1804 |
| 4-6486522-2 | SEQ ID NO: 748 | SEQ ID NO: 1805 |
| 4-3381696-2 | SEQ ID NO: 749 | SEQ ID NO: 1806 |
| 4-6102410-3 | SEQ ID NO: 750 | SEQ ID NO: 1807 |
| 4-10485598-2 | SEQ ID NO: 751 | SEQ ID NO: 1808 |
| 4-14528374-2 | SEQ ID NO: 752 | SEQ ID NO: 1809 |
| 4-6910586-2 | SEQ ID NO: 753 | SEQ ID NO: 1810 |
| 4-1175262-3 | SEQ ID NO: 754 | SEQ ID NO: 1811 |
| 4-12795613-3 | SEQ ID NO: 755 | SEQ ID NO: 1812 |
| 4-9244418-2 | SEQ ID NO: 756 | SEQ ID NO: 1813 |
| 4-6482247-3 | SEQ ID NO: 757 | SEQ ID NO: 1814 |
| 4-5219438-4 | SEQ ID NO: 758 | SEQ ID NO: 1815 |
| 4-11922365-2 | SEQ ID NO: 759 | SEQ ID NO: 1816 |
| 4-609357-2 | SEQ ID NO: 760 | SEQ ID NO: 1817 |
| 4-2398287-2 | SEQ ID NO: 761 | SEQ ID NO: 1818 |
| 4-4545492-2 | SEQ ID NO: 762 | SEQ ID NO: 1819 |
| 4-13238753-3 | SEQ ID NO: 763 | SEQ ID NO: 1820 |
| 4-11112882-3 | SEQ ID NO: 764 | SEQ ID NO: 1821 |
| 4-8588049-2 | SEQ ID NO: 765 | SEQ ID NO: 1822 |
| 4-12753525-2 | SEQ ID NO: 766 | SEQ ID NO: 1823 |
| 4-48251-2 | SEQ ID NO: 767 | SEQ ID NO: 1824 |
| 4-7181238-2 | SEQ ID NO: 768 | SEQ ID NO: 1825 |
| 4-7595088-2 | SEQ ID NO: 769 | SEQ ID NO: 1826 |
| 4-10466330-2 | SEQ ID NO: 770 | SEQ ID NO: 1827 |
| 4-8792031-2 | SEQ ID NO: 771 | SEQ ID NO: 1828 |
| 4-6373021-2 | SEQ ID NO: 772 | SEQ ID NO: 1829 |
| 4-8648860-2 | SEQ ID NO: 773 | SEQ ID NO: 1830 |
| 4-13568679-2 | SEQ ID NO: 774 | SEQ ID NO: 1831 |
| 4-8004216-2 | SEQ ID NO: 775 | SEQ ID NO: 1832 |
| 4-6794114-2 | SEQ ID NO: 776 | SEQ ID NO: 1833 |
| 4-6962898-3 | SEQ ID NO: 777 | SEQ ID NO: 1834 |
| 4-5481102-3 | SEQ ID NO: 778 | SEQ ID NO: 1835 |
| 4-2717399-2 | SEQ ID NO: 779 | SEQ ID NO: 1836 |
| 4-4159662-3 | SEQ ID NO: 780 | SEQ ID NO: 1837 |
| 5-2829056-3 | SEQ ID NO: 781 | SEQ ID NO: 1838 |
| 5-565972-2 | SEQ ID NO: 782 | SEQ ID NO: 1839 |
| 5-2120962-3 | SEQ ID NO: 783 | SEQ ID NO: 1840 |
| 5-1020879-11 | SEQ ID NO: 784 | SEQ ID NO: 1841 |
| 5-749568-2 | SEQ ID NO: 785 | SEQ ID NO: 1842 |
| 5-1054065-21 | SEQ ID NO: 786 | SEQ ID NO: 1843 |
| 5-854-158 | SEQ ID NO: 787 | SEQ ID NO: 1844 |
| 5-1170708-3 | SEQ ID NO: 788 | SEQ ID NO: 1845 |
| 5-50360-15 | SEQ ID NO: 789 | SEQ ID NO: 1846 |
| 5-1383597-2 | SEQ ID NO: 790 | SEQ ID NO: 1847 |
| 5-2705599-2 | SEQ ID NO: 791 | SEQ ID NO: 1848 |
| 5-1130896-2 | SEQ ID NO: 792 | SEQ ID NO: 1849 |
| 5-1038048-2 | SEQ ID NO: 793 | SEQ ID NO: 1850 |
| 5-1135283-2 | SEQ ID NO: 794 | SEQ ID NO: 1851 |
| 5-2893875-2 | SEQ ID NO: 795 | SEQ ID NO: 1852 |
| 5-3186217-2 | SEQ ID NO: 796 | SEQ ID NO: 1853 |
| 5-1012006-2 | SEQ ID NO: 797 | SEQ ID NO: 1854 |
| 5-1037600-4 | SEQ ID NO: 798 | SEQ ID NO: 1855 |
| 5-1402975-3 | SEQ ID NO: 799 | SEQ ID NO: 1856 |
| 5-2631492-5 | SEQ ID NO: 800 | SEQ ID NO: 1857 |
| 5-1637513-2 | SEQ ID NO: 801 | SEQ ID NO: 1858 |
| 5-1376127-2 | SEQ ID NO: 802 | SEQ ID NO: 1859 |
| 5-2007790-4 | SEQ ID NO: 803 | SEQ ID NO: 1860 |
| 5-13204-283 | SEQ ID NO: 804 | SEQ ID NO: 1861 |
| 5-2587052-13 | SEQ ID NO: 805 | SEQ ID NO: 1862 |
| 5-1195003-2 | SEQ ID NO: 806 | SEQ ID NO: 1863 |
| 5-2670630-2 | SEQ ID NO: 807 | SEQ ID NO: 1864 |
| 5-1901924-10 | SEQ ID NO: 808 | SEQ ID NO: 1865 |
| 5-23953-5 | SEQ ID NO: 809 | SEQ ID NO: 1866 |
| 5-217863-2 | SEQ ID NO: 810 | SEQ ID NO: 1867 |
| 5-1571958-2 | SEQ ID NO: 811 | SEQ ID NO: 1868 |
| 5-1959833-18 | SEQ ID NO: 812 | SEQ ID NO: 1869 |
| 5-1031826-27 | SEQ ID NO: 813 | SEQ ID NO: 1870 |
| 5-41960-97 | SEQ ID NO: 814 | SEQ ID NO: 1871 |
| 5-1923420-2 | SEQ ID NO: 815 | SEQ ID NO: 1872 |
| 5-1092647-6 | SEQ ID NO: 816 | SEQ ID NO: 1873 |
| 5-2552779-4 | SEQ ID NO: 817 | SEQ ID NO: 1874 |
| 5-686-192 | SEQ ID NO: 818 | SEQ ID NO: 1875 |
| 5-2944422-2 | SEQ ID NO: 819 | SEQ ID NO: 1876 |
| 5-2529089-143 | SEQ ID NO: 820 | SEQ ID NO: 1877 |
| 5-38164-2 | SEQ ID NO: 821 | SEQ ID NO: 1878 |
| 5-1502750-3 | SEQ ID NO: 822 | SEQ ID NO: 1879 |
| 5-2857200-2 | SEQ ID NO: 823 | SEQ ID NO: 1880 |
| 5-32716-2 | SEQ ID NO: 824 | SEQ ID NO: 1881 |
| 5-1928401-49 | SEQ ID NO: 825 | SEQ ID NO: 1882 |
| 5-1212566-4 | SEQ ID NO: 826 | SEQ ID NO: 1883 |
| 5-1122882-9 | SEQ ID NO: 827 | SEQ ID NO: 1884 |
| 5-51576-5 | SEQ ID NO: 828 | SEQ ID NO: 1885 |
| 5-118624-5 | SEQ ID NO: 829 | SEQ ID NO: 1886 |
| 5-2048039-2 | SEQ ID NO: 830 | SEQ ID NO: 1887 |
| 5-1013605-11 | SEQ ID NO: 831 | SEQ ID NO: 1888 |
| 5-394268-2 | SEQ ID NO: 832 | SEQ ID NO: 1889 |
| 5-1924606-22 | SEQ ID NO: 833 | SEQ ID NO: 1890 |
| 5-2842754-2 | SEQ ID NO: 834 | SEQ ID NO: 1891 |
| 5-1061053-2 | SEQ ID NO: 835 | SEQ ID NO: 1892 |
| 5-2532260-2 | SEQ ID NO: 836 | SEQ ID NO: 1893 |
| 5-2593-2 | SEQ ID NO: 837 | SEQ ID NO: 1894 |
| 5-2592305-11 | SEQ ID NO: 838 | SEQ ID NO: 1895 |
| 5-661674-2 | SEQ ID NO: 839 | SEQ ID NO: 1896 |
| 5-3070158-2 | SEQ ID NO: 840 | SEQ ID NO: 1897 |
| 5-306996-2 | SEQ ID NO: 841 | SEQ ID NO: 1898 |
| 5-5105-177 | SEQ ID NO: 842 | SEQ ID NO: 1899 |
| 5-2523605-47 | SEQ ID NO: 843 | SEQ ID NO: 1900 |
| 5-1901007-7 | SEQ ID NO: 844 | SEQ ID NO: 1901 |
| 5-3146146-2 | SEQ ID NO: 845 | SEQ ID NO: 1902 |
| 5-1519916-3 | SEQ ID NO: 846 | SEQ ID NO: 1903 |
| 5-1931939-4 | SEQ ID NO: 847 | SEQ ID NO: 1904 |
| 5-1329045-2 | SEQ ID NO: 848 | SEQ ID NO: 1905 |
| 5-2636281-6 | SEQ ID NO: 849 | SEQ ID NO: 1906 |
| 5-2677818-2 | SEQ ID NO: 850 | SEQ ID NO: 1907 |
| 5-2006146-2 | SEQ ID NO: 851 | SEQ ID NO: 1908 |
| 5-104887-42 | SEQ ID NO: 852 | SEQ ID NO: 1909 |
| 5-1917751-2 | SEQ ID NO: 853 | SEQ ID NO: 1910 |
| 5-117495-3 | SEQ ID NO: 854 | SEQ ID NO: 1911 |
| 5-2526096-56 | SEQ ID NO: 855 | SEQ ID NO: 1912 |
| 5-523992-3 | SEQ ID NO: 856 | SEQ ID NO: 1913 |
| 5-2915546-3 | SEQ ID NO: 857 | SEQ ID NO: 1914 |
| 5-2528072-143 | SEQ ID NO: 858 | SEQ ID NO: 1915 |
| 5-1032651-190 | SEQ ID NO: 859 | SEQ ID NO: 1916 |
| 5-1198817-2 | SEQ ID NO: 860 | SEQ ID NO: 1917 |
| 5-12970-57 | SEQ ID NO: 861 | SEQ ID NO: 1918 |
| 5-1987237-2 | SEQ ID NO: 862 | SEQ ID NO: 1919 |
| 5-2216357-2 | SEQ ID NO: 863 | SEQ ID NO: 1920 |
| 5-2355075-2 | SEQ ID NO: 864 | SEQ ID NO: 1921 |
| 5-1079490-17 | SEQ ID NO: 865 | SEQ ID NO: 1922 |
| 5-3009197-2 | SEQ ID NO: 866 | SEQ ID NO: 1923 |
| 5-1921849-10 | SEQ ID NO: 867 | SEQ ID NO: 1924 |
| 5-1913908-4 | SEQ ID NO: 868 | SEQ ID NO: 1925 |
| 5-2676962-7 | SEQ ID NO: 869 | SEQ ID NO: 1926 |
| 5-46711-25 | SEQ ID NO: 870 | SEQ ID NO: 1927 |
| 5-1918507-18 | SEQ ID NO: 871 | SEQ ID NO: 1928 |
| 5-3238118-2 | SEQ ID NO: 872 | SEQ ID NO: 1929 |
| 5-2629877-4 | SEQ ID NO: 873 | SEQ ID NO: 1930 |
| 5-134597-7 | SEQ ID NO: 874 | SEQ ID NO: 1931 |
| 5-230952-2 | SEQ ID NO: 875 | SEQ ID NO: 1932 |
| 5-2672385-2 | SEQ ID NO: 876 | SEQ ID NO: 1933 |
| 5-1486985-2 | SEQ ID NO: 877 | SEQ ID NO: 1934 |
| 5-460730-2 | SEQ ID NO: 878 | SEQ ID NO: 1935 |
| 5-411642-3 | SEQ ID NO: 879 | SEQ ID NO: 1936 |
| 5-2528289-2 | SEQ ID NO: 880 | SEQ ID NO: 1937 |
| 5-111537-4 | SEQ ID NO: 881 | SEQ ID NO: 1938 |
| 5-17288-89 | SEQ ID NO: 882 | SEQ ID NO: 1939 |
| 5-151431-5 | SEQ ID NO: 883 | SEQ ID NO: 1940 |
| 5-2051967-2 | SEQ ID NO: 884 | SEQ ID NO: 1941 |
| 5-596955-2 | SEQ ID NO: 885 | SEQ ID NO: 1942 |
| 5-16888-28 | SEQ ID NO: 886 | SEQ ID NO: 1943 |
| 5-1145273-4 | SEQ ID NO: 887 | SEQ ID NO: 1944 |
| 5-1905626-5 | SEQ ID NO: 888 | SEQ ID NO: 1945 |
| 5-2074121-7 | SEQ ID NO: 889 | SEQ ID NO: 1946 |
| 5-2063525-7 | SEQ ID NO: 890 | SEQ ID NO: 1947 |
| 5-1967544-2 | SEQ ID NO: 891 | SEQ ID NO: 1948 |
| 5-44097-3 | SEQ ID NO: 892 | SEQ ID NO: 1949 |
| 5-2621779-2 | SEQ ID NO: 893 | SEQ ID NO: 1950 |
| 5-611475-2 | SEQ ID NO: 894 | SEQ ID NO: 1951 |
| 5-1229307-3 | SEQ ID NO: 895 | SEQ ID NO: 1952 |
| 5-206606-4 | SEQ ID NO: 896 | SEQ ID NO: 1953 |
| 5-889050-2 | SEQ ID NO: 897 | SEQ ID NO: 1954 |
| 5-3581-203 | SEQ ID NO: 898 | SEQ ID NO: 1955 |
| 5-1905882-9 | SEQ ID NO: 899 | SEQ ID NO: 1956 |
| 5-1902084-35 | SEQ ID NO: 900 | SEQ ID NO: 1957 |
| 5-1104533-2 | SEQ ID NO: 901 | SEQ ID NO: 1958 |
| 5-1430263-2 | SEQ ID NO: 902 | SEQ ID NO: 1959 |
| 5-1266707-2 | SEQ ID NO: 903 | SEQ ID NO: 1960 |
| 5-1943151-5 | SEQ ID NO: 904 | SEQ ID NO: 1961 |
| 5-2705097-2 | SEQ ID NO: 905 | SEQ ID NO: 1962 |
| 5-2543477-18 | SEQ ID NO: 906 | SEQ ID NO: 1963 |
| 5-432252-3 | SEQ ID NO: 907 | SEQ ID NO: 1964 |
| 5-1259595-10 | SEQ ID NO: 908 | SEQ ID NO: 1965 |
| 5-2567948-19 | SEQ ID NO: 909 | SEQ ID NO: 1966 |
| 5-299244-3 | SEQ ID NO: 910 | SEQ ID NO: 1967 |
| 5-1099746-5 | SEQ ID NO: 911 | SEQ ID NO: 1968 |
| 5-1052667-6 | SEQ ID NO: 912 | SEQ ID NO: 1969 |
| 5-21817-5 | SEQ ID NO: 913 | SEQ ID NO: 1970 |
| 5-2676010-9 | SEQ ID NO: 914 | SEQ ID NO: 1971 |
| 5-22014-3 | SEQ ID NO: 915 | SEQ ID NO: 1972 |
| 5-85116-2 | SEQ ID NO: 916 | SEQ ID NO: 1973 |
| 5-1404040-3 | SEQ ID NO: 917 | SEQ ID NO: 1974 |
| 5-2596440-4 | SEQ ID NO: 918 | SEQ ID NO: 1975 |
| 5-276868-4 | SEQ ID NO: 919 | SEQ ID NO: 1976 |
| 5-26437-2 | SEQ ID NO: 920 | SEQ ID NO: 1977 |
| 5-1931690-44 | SEQ ID NO: 921 | SEQ ID NO: 1978 |
| 5-1017692-94 | SEQ ID NO: 922 | SEQ ID NO: 1979 |
| 5-2540817-50 | SEQ ID NO: 923 | SEQ ID NO: 1980 |
| 5-2742127-2 | SEQ ID NO: 924 | SEQ ID NO: 1981 |
| 5-630548-4 | SEQ ID NO: 925 | SEQ ID NO: 1982 |
| 5-14201-89 | SEQ ID NO: 926 | SEQ ID NO: 1983 |
| 5-1026744-24 | SEQ ID NO: 927 | SEQ ID NO: 1984 |
| 5-1340661-2 | SEQ ID NO: 928 | SEQ ID NO: 1985 |
| 5-2537215-71 | SEQ ID NO: 929 | SEQ ID NO: 1986 |
| 5-77902-2 | SEQ ID NO: 930 | SEQ ID NO: 1987 |
| 5-2464979-2 | SEQ ID NO: 931 | SEQ ID NO: 1988 |
| 5-2079914-3 | SEQ ID NO: 932 | SEQ ID NO: 1989 |
| 5-261958-5 | SEQ ID NO: 933 | SEQ ID NO: 1990 |
| 5-78727-3 | SEQ ID NO: 934 | SEQ ID NO: 1991 |
| 5-2909528-5 | SEQ ID NO: 935 | SEQ ID NO: 1992 |
| 5-1083544-6 | SEQ ID NO: 936 | SEQ ID NO: 1993 |
| 5-2535307-11 | SEQ ID NO: 937 | SEQ ID NO: 1994 |
| 5-1072522-20 | SEQ ID NO: 938 | SEQ ID NO: 1995 |
| 5-2959014-2 | SEQ ID NO: 939 | SEQ ID NO: 1996 |
| 5-1471554-2 | SEQ ID NO: 940 | SEQ ID NO: 1997 |
| 5-1072458-2 | SEQ ID NO: 941 | SEQ ID NO: 1998 |
| 5-1310308-2 | SEQ ID NO: 942 | SEQ ID NO: 1999 |
| 5-1168709-3 | SEQ ID NO: 943 | SEQ ID NO: 2000 |
| 5-1040915-6 | SEQ ID NO: 944 | SEQ ID NO: 2001 |
| 5-1109831-8 | SEQ ID NO: 945 | SEQ ID NO: 2002 |
| 5-1066115-14 | SEQ ID NO: 946 | SEQ ID NO: 2003 |
| 5-2529013-51 | SEQ ID NO: 947 | SEQ ID NO: 2004 |
| 5-2366950-2 | SEQ ID NO: 948 | SEQ ID NO: 2005 |
| 5-2699971-6 | SEQ ID NO: 949 | SEQ ID NO: 2006 |
| 5-553990-2 | SEQ ID NO: 950 | SEQ ID NO: 2007 |
| 5-1382556-3 | SEQ ID NO: 951 | SEQ ID NO: 2008 |
| 5-1950979-26 | SEQ ID NO: 952 | SEQ ID NO: 2009 |
| 5-467037-3 | SEQ ID NO: 953 | SEQ ID NO: 2010 |
| 5-386603-2 | SEQ ID NO: 954 | SEQ ID NO: 2011 |
| 5-1483917-2 | SEQ ID NO: 955 | SEQ ID NO: 2012 |
| 5-2728374-2 | SEQ ID NO: 956 | SEQ ID NO: 2013 |
| 5-1044027-43 | SEQ ID NO: 957 | SEQ ID NO: 2014 |
| 5-165461-22 | SEQ ID NO: 958 | SEQ ID NO: 2015 |
| 5-1183372-7 | SEQ ID NO: 959 | SEQ ID NO: 2016 |
| 5-2030894-2 | SEQ ID NO: 960 | SEQ ID NO: 2017 |
| 5-2528718-86 | SEQ ID NO: 961 | SEQ ID NO: 2018 |
| 5-249597-3 | SEQ ID NO: 962 | SEQ ID NO: 2019 |
| 5-2234117-2 | SEQ ID NO: 963 | SEQ ID NO: 2020 |
| 5-676040-4 | SEQ ID NO: 964 | SEQ ID NO: 2021 |
| 5-2633578-5 | SEQ ID NO: 965 | SEQ ID NO: 2022 |
| 5-3075427-2 | SEQ ID NO: 966 | SEQ ID NO: 2023 |
| 5-2475184-2 | SEQ ID NO: 967 | SEQ ID NO: 2024 |
| 5-2663669-2 | SEQ ID NO: 968 | SEQ ID NO: 2025 |
| 5-1327278-2 | SEQ ID NO: 969 | SEQ ID NO: 2026 |
| 5-1905648-43 | SEQ ID NO: 970 | SEQ ID NO: 2027 |
| 5-1981142-2 | SEQ ID NO: 971 | SEQ ID NO: 2028 |
| 5-670280-2 | SEQ ID NO: 972 | SEQ ID NO: 2029 |
| 5-126801-3 | SEQ ID NO: 973 | SEQ ID NO: 2030 |
| 5-2027639-2 | SEQ ID NO: 974 | SEQ ID NO: 2031 |
| 5-3067631-2 | SEQ ID NO: 975 | SEQ ID NO: 2032 |
| 5-113579-2 | SEQ ID NO: 976 | SEQ ID NO: 2033 |
| 5-2569664-2 | SEQ ID NO: 977 | SEQ ID NO: 2034 |
| 5-36294-3 | SEQ ID NO: 978 | SEQ ID NO: 2035 |
| 5-545155-2 | SEQ ID NO: 979 | SEQ ID NO: 2036 |
| 5-1232366-2 | SEQ ID NO: 980 | SEQ ID NO: 2037 |
| 5-306980-2 | SEQ ID NO: 981 | SEQ ID NO: 2038 |
| 5-118199-3 | SEQ ID NO: 982 | SEQ ID NO: 2039 |
| 5-1678433-2 | SEQ ID NO: 983 | SEQ ID NO: 2040 |
| 5-42118-2 | SEQ ID NO: 984 | SEQ ID NO: 2041 |
| 5-420970-3 | SEQ ID NO: 985 | SEQ ID NO: 2042 |
| 5-2716127-2 | SEQ ID NO: 986 | SEQ ID NO: 2043 |
| 5-1555113-2 | SEQ ID NO: 987 | SEQ ID NO: 2044 |
| 5-1270243-2 | SEQ ID NO: 988 | SEQ ID NO: 2045 |
| 5-1450438-3 | SEQ ID NO: 989 | SEQ ID NO: 2046 |
| 5-2939255-2 | SEQ ID NO: 990 | SEQ ID NO: 2047 |
| 5-2742093-2 | SEQ ID NO: 991 | SEQ ID NO: 2048 |
| 5-517535-3 | SEQ ID NO: 992 | SEQ ID NO: 2049 |
| 5-1023472-25 | SEQ ID NO: 993 | SEQ ID NO: 2050 |
| 5-360426-2 | SEQ ID NO: 994 | SEQ ID NO: 2051 |
| 5-1962210-2 | SEQ ID NO: 995 | SEQ ID NO: 2052 |
| 5-2109609-6 | SEQ ID NO: 996 | SEQ ID NO: 2053 |
| 5-390720-2 | SEQ ID NO: 997 | SEQ ID NO: 2054 |
| 5-1265740-2 | SEQ ID NO: 998 | SEQ ID NO: 2055 |
| 5-1201165-2 | SEQ ID NO: 999 | SEQ ID NO: 2056 |
| 5-2691520-2 | SEQ ID NO: 1000 | SEQ ID NO: 2057 |
| 5-42433-18 | SEQ ID NO: 1001 | SEQ ID NO: 2058 |
| 5-77301-2 | SEQ ID NO: 1002 | SEQ ID NO: 2059 |
| 5-1271723-3 | SEQ ID NO: 1003 | SEQ ID NO: 2060 |
| 5-2558584-2 | SEQ ID NO: 1004 | SEQ ID NO: 2061 |
| 5-1979919-2 | SEQ ID NO: 1005 | SEQ ID NO: 2062 |
| 5-1291905-2 | SEQ ID NO: 1006 | SEQ ID NO: 2063 |
| 5-1215029-2 | SEQ ID NO: 1007 | SEQ ID NO: 2064 |
| 5-510644-4 | SEQ ID NO: 1008 | SEQ ID NO: 2065 |
| 5-2088084-2 | SEQ ID NO: 1009 | SEQ ID NO: 2066 |
| 5-886686-2 | SEQ ID NO: 1010 | SEQ ID NO: 2067 |
| 5-490241-2 | SEQ ID NO: 1011 | SEQ ID NO: 2068 |
| 5-889172-2 | SEQ ID NO: 1012 | SEQ ID NO: 2069 |
| 5-1204407-2 | SEQ ID NO: 1013 | SEQ ID NO: 2070 |
| 5-1048785-17 | SEQ ID NO: 1014 | SEQ ID NO: 2071 |
| 5-2638944-2 | SEQ ID NO: 1015 | SEQ ID NO: 2072 |
| 5-1341138-2 | SEQ ID NO: 1016 | SEQ ID NO: 2073 |
| 5-585203-2 | SEQ ID NO: 1017 | SEQ ID NO: 2074 |
| 5-98324-3 | SEQ ID NO: 1018 | SEQ ID NO: 2075 |
| 5-2974173-2 | SEQ ID NO: 1019 | SEQ ID NO: 2076 |
| 5-1262349-2 | SEQ ID NO: 1020 | SEQ ID NO: 2077 |
| 5-1527609-2 | SEQ ID NO: 1021 | SEQ ID NO: 2078 |
| 5-1402594-2 | SEQ ID NO: 1022 | SEQ ID NO: 2079 |
| 5-1585933-2 | SEQ ID NO: 1023 | SEQ ID NO: 2080 |
| 5-2536647-3 | SEQ ID NO: 1024 | SEQ ID NO: 2081 |
| 5-1047394-9 | SEQ ID NO: 1025 | SEQ ID NO: 2082 |
| 5-3166391-2 | SEQ ID NO: 1026 | SEQ ID NO: 2083 |
| 5-1104151-2 | SEQ ID NO: 1027 | SEQ ID NO: 2084 |
| 5-1166523-6 | SEQ ID NO: 1028 | SEQ ID NO: 2085 |
| 5-1240577-4 | SEQ ID NO: 1029 | SEQ ID NO: 2086 |
| 5-1930341-3 | SEQ ID NO: 1030 | SEQ ID NO: 2087 |
| 5-361729-2 | SEQ ID NO: 1031 | SEQ ID NO: 2088 |
| 5-1431176-2 | SEQ ID NO: 1032 | SEQ ID NO: 2089 |
| 5-1282370-2 | SEQ ID NO: 1033 | SEQ ID NO: 2090 |
| 5-1959556-2 | SEQ ID NO: 1034 | SEQ ID NO: 2091 |
| 5-1144154-2 | SEQ ID NO: 1035 | SEQ ID NO: 2092 |
| 5-752607-2 | SEQ ID NO: 1036 | SEQ ID NO: 2093 |
| 5-3140019-2 | SEQ ID NO: 1037 | SEQ ID NO: 2094 |
| 5-2625202-2 | SEQ ID NO: 1038 | SEQ ID NO: 2095 |
| 5-1961020-2 | SEQ ID NO: 1039 | SEQ ID NO: 2096 |
| 5-1944760-2 | SEQ ID NO: 1040 | SEQ ID NO: 2097 |
| 5-477551-4 | SEQ ID NO: 1041 | SEQ ID NO: 2098 |
| 5-661227-2 | SEQ ID NO: 1042 | SEQ ID NO: 2099 |
| 5-1402163-2 | SEQ ID NO: 1043 | SEQ ID NO: 2100 |
| 5-2578715-2 | SEQ ID NO: 1044 | SEQ ID NO: 2101 |
| 5-2556404-2 | SEQ ID NO: 1045 | SEQ ID NO: 2102 |
| 5-63662-3 | SEQ ID NO: 1046 | SEQ ID NO: 2103 |
| 5-576971-2 | SEQ ID NO: 1047 | SEQ ID NO: 2104 |
| 5-1943740-2 | SEQ ID NO: 1048 | SEQ ID NO: 2105 |
| 5-175719-2 | SEQ ID NO: 1049 | SEQ ID NO: 2106 |
| 5-1059042-2 | SEQ ID NO: 1050 | SEQ ID NO: 2107 |
| 5-1122382-3 | SEQ ID NO: 1051 | SEQ ID NO: 2108 |
| 5-2703852-2 | SEQ ID NO: 1052 | SEQ ID NO: 2109 |
| 5-2542749-2 | SEQ ID NO: 1053 | SEQ ID NO: 2110 |
| 5-189359-4 | SEQ ID NO: 1054 | SEQ ID NO: 2111 |
| 5-2961307-2 | SEQ ID NO: 1055 | SEQ ID NO: 2112 |
| 5-649316-3 | SEQ ID NO: 1056 | SEQ ID NO: 2113 |
| 5-2158968-2 | SEQ ID NO: 1057 | SEQ ID NO: 2114 |

TABLE 2

| | | | | | | | | | | Pseudo typed | PRNT | PRNT | Amino |
|---|---|---|---|---|---|---|---|---|---|---|---|---|---|
| | | | | | | | ELISA | | | SARS-CoV-2 | SARS- | SARS- | Acid |
| | ELISA of | | ELISA of | | ELISA of | | of BM- | | | (D614G, | CoV-2 | CoV-2 | (Protein) |
| | SARS- | | SARS- | | RmYN02- | | 4831- | | | Wuhan-Hu-1) | Munich | Delta | Sequence |
| | CoV-2 | | CoV-1 | | CoV | | CoV | | | neutralization | IC50 | IC50 | (SEQ ID |
| Nanobody | RBD | | RBD | | RBD | | RBD | | SEC | IC50 (nM) | (nM) | (nM) | NO) |
| 5p-1 | 10-100 | nM | 0.1-1 | μM | 1-8 | μM | 1-8 | μM | Group D | >2500 | | | SEQ ID NO: |
| | | | | | | | | | | | | | 1058 |
| 5p-2 | 10-100 | nM | 10-100 | nM | 1-8 | μM | 1-8 | μM | Group D | >2500 | | | SEQ ID NO: |
| | | | | | | | | | | | | | 1059 |
| 5p-3 | <10 | nM | 10-100 | nM | 10-100 | nM | 10-100 | nM | Group E | >2500 | | | SEQ ID NO: |
| | | | | | | | | | | | | | 1060 |
| 5p-4 | <10 | nM | 10-100 | nM | 0.1-1 | μM | >8 | μM | Group E | >2500 | | | SEQ ID NO: |
| | | | | | | | | | | | | | 1061 |
| 5p-5 | 10-100 | nM | 10-100 | nM | >8 | μM | >8 | μM | Group D | >2500 | | | SEQ ID NO: |
| | | | | | | | | | | | | | 1062 |
| 5p-6 | <10 | nM | 10-100 | nM | 0.1-1 | μM | 1-8 | μM | Group E | >2500 | | | SEQ ID NO: |
| | | | | | | | | | | | | | 1260 |
| 5p-10 | <10 | nM | 10-100 | nM | 0.1-1 | μM | >8 | μM | Group E | >2500 | | | SEQ ID NO: |
| | | | | | | | | | | | | | 1063 |
| 5p-13 | <10 | nM | <10 | nM | 0.1-1 | μM | >8 | μM | Group E | >2500 | | | SEQ ID NO: |
| | | | | | | | | | | | | | 1261 |
| 5p-14 | <10 | nM | <10 | nM | 10-100 | nM | >8 | μM | Group E | >2500 | | | SEQ ID NO: |
| | | | | | | | | | | | | | 1064 |
| 5p-15 | 10-100 | nM | 10-100 | nM | 0.1-1 | μM | 1-8 | μM | Group E | >2500 | | | SEQ ID NO: |
| | | | | | | | | | | | | | 1065 |
| 5p-16 | <10 | nM | 10-100 | nM | 10-100 | nM | 10-100 | nM | Group E | >2500 | | | SEQ ID NO: |
| | | | | | | | | | | | | | 1262 |
| 5p-17 | <10 | nM | <10 | nM | 10-100 | nM | 10-100 | nM | Group E | >2500 | | | SEQ ID NO: |
| | | | | | | | | | | | | | 1066 |
| 5p-18 | <10 | nM | <10 | nM | 10-100 | nM | 0.1-1 | μM | Group E | >2500 | | | SEQ ID NO: |
| | | | | | | | | | | | | | 1067 |
| 5p-20 | <10 | nM | 0.1-1 | μM | 0.1-1 | μM | >8 | μM | Group E | >2500 | | | SEQ ID NO: |
| | | | | | | | | | | | | | 1068 |
| 5p-23 | <10 | nM | 10-100 | nM | 0.1-1 | μM | >8 | μM | Group E | >2500 | | | SEQ ID NO: |
| | | | | | | | | | | | | | 1069 |
| 5p-24 | <10 | nM | <10 | nM | 10-100 | nM | 1-8 | μM | Group E | >2500 | | | SEQ ID NO: |
| | | | | | | | | | | | | | 1070 |
| 5p-25 | <10 | nM | <10 | nM | 0.1-1 | μM | >8 | μM | Group E | >2500 | | | SEQ ID NO: |
| | | | | | | | | | | | | | 1071 |
| 5p-26 | <10 | nM | >8 | μM | 1-8 | μM | 1-8 | μM | Group D | 2000 | | | SEQ ID NO: |
| | | | | | | | | | | | | | 1072 |
| 5p-34 | <10 | nM | <10 | nM | <10 | nM | 1-8 | μM | Group B | 7.27 | 32.2 | 8.76 | SEQ ID NO: |
| | | | | | | | | | | | | | 1074 |
| 5p-35 | <10 | nM | <10 | nM | <10 | nM | 10-100 | nM | Group B | 4.05 | 42.2 | 21 | SEQ ID NO: |
| | | | | | | | | | | | | | 1075 |
| 5p-37 | <10 | nM | 10-100 | nM | 10-100 | nM | >8 | μM | Group B | 14.4 | | | SEQ ID NO: |
| | | | | | | | | | | | | | 1077 |
| 5p-38 | <10 | nM | <10 | nM | <10 | nM | 0.1-1 | μM | Group B | 6.63 | 59.9 | 34.7 | SEQ ID NO: |
| | | | | | | | | | | | | | 1078 |
| 5p-40 | <10 | nM | <10 | nM | 10-100 | nM | 1-8 | μM | Group E | >2500 | | | SEQ ID NO: |
| | | | | | | | | | | | | | 1079 |
| 5p-47 | <10 | nM | 1-8 | μM | >8 | μM | >8 | μM | Group E | >2500 | | | SEQ ID NO: |
| | | | | | | | | | | | | | 1080 |
| 5p-58 | <10 | nM | 1-8 | μM | 0.1-1 | μM | >8 | μM | Group D | 493 | | | SEQ ID NO: |
| | | | | | | | | | | | | | 1082 |
| 5p-59 | <10 | nM | >8 | μM | <10 | nM | >8 | μM | Group B | 6.2 | | | SEQ ID NO: |
| | | | | | | | | | | | | | 1083 |
| 5p-60 | <10 | nM | <10 | nM | 10 | nM | >8 | μM | Group B | 0.9 | 9.79 | 8.74 | SEQ ID NO: |
| | | | | | | | | | | | | | 1084 |
| 5p-61 | <10 | nM | 10-100 | nM | 0.1-1 | μM | >8 | μM | Group E | >2500 | | | SEQ ID NO: |
| | | | | | | | | | | | | | 1085 |
| 5p-63 | <10 | nM | <10 | nM | 10-100 | nM | 0.1-1 | μM | Group C | >2500 | | | SEQ ID NO: |
| | | | | | | | | | | | | | 1271 |
| 5p-64 | <10 | nM | <10 | nM | 10-100 | nM | 10-100 | nM | Group D | >2500 | to be | to be | SEQ ID NO: |
| | | | | | | | | | | | done | done | 1086 |
| 5p-68 | <10 | nM | 10-100 | nM | 0.1-1 | μM | 1-8 | μM | Group E | >2500 | | | SEQ ID NO: |
| | | | | | | | | | | | | | 1087 |
| 5p-74 | <10 | nM | <10 | nM | 10-100 | nM | 0.1-1 | μM | Group E | >2500 | | | SEQ ID NO: |
| | | | | | | | | | | | | | 1274 |
| 5p-78 | <10 | nM | <10 | nM | <10 | nM | 1-8 | μM | Group B | 11.4 | | | SEQ ID NO: |
| | | | | | | | | | | | | | 1089 |
| 5p-82 | 10-100 | nM | 10-100 | nM | >8 | μM | 1-8 | μM | Group D | >2500 | | | SEQ ID NO: |
| | | | | | | | | | | | | | 1111 |
| 5p-89 | 10-100 | nM | 10-100 | nM | >8 | μM | 0.1-1 | μM | Group D | >2500 | | | SEQ ID NO: |
| | | | | | | | | | | | | | 1118 |
| 5p-93 | <10 | nM | >8 | μM | 10-100 | nM | 10-100 | nM | Group C | 140 | 264 | 171 | SEQ ID NO: |
| | | | | | | | | | | | | | 1122 |
| 5p-98 | <10 | nM | 10-100 | nM | 0.1-1 | μM | 1-8 | μM | Group E | >2500 | | | SEQ ID NO: |
| | | | | | | | | | | | | | 1127 |
| 5p-99 | <10 | nM | 1-8 | μM | >8 | μM | >8 | μM | Group E | >2500 | | | SEQ ID NO: |
| | | | | | | | | | | | | | 1128 |
| 5p-109 | <10 | nM | >8 | μM | 10-100 | nM | 0.1-1 | μM | Group D | 482 | 410 | 313 | SEQ ID NO: |
| | | | | | | | | | | | | | 1129 |
| 5p-100 | <10 | nM | 1-8 | μM | >8 | μM | >8 | μM | Group A | >2500 | | | SEQ ID NO: |
| | | | | | | | | | | | | | 1130 |
| 5p-101 | <10 | nM | 10-100 | nM | 10-100 | nM | 10-100 | nM | Group E | >2500 | | | SEQ ID NO: |
| | | | | | | | | | | | | | 1132 |
| 5p-103 | 10-100 | nM | 10-100 | nM | 0.1-1 | μM | 1-8 | μM | Group E | >2500 | | | SEQ ID NO: |
| | | | | | | | | | | | | | 1133 |
| 5p-104 | <10 | nM | <10 | nM | 10-100 | nM | 0.1-1 | μM | Group E | >2500 | | | SEQ ID NO: |
| | | | | | | | | | | | | | 1134 |
| 5p-105 | <10 | nM | <10 | nM | 10-100 | nM | 1-8 | μM | Group E | >2500 | | | SEQ ID NO: |
| | | | | | | | | | | | | | 1138 |
| 5p-117 | <10 | nM | <10 | nM | <10 | nM | 1-8 | μM | Group B | 9.09 | 10.6 | 27.2 | SEQ ID NO: |
| | | | | | | | | | | | | | 1146 |
| 5p-118 | <10 | nM | <10 | nM | <10 | nM | <10 | nM | Group B | 5.12 | 7.41 | 3.62 | SEQ ID NO: |
| | | | | | | | | | | | | | 1147 |
| 5p-119 | <10 | nM | <10 | nM | <10 | nM | 0.1-1 | μM | Group B | 19 | | | SEQ ID NO: |
| | | | | | | | | | | | | | 1148 |
| 5p-120 | <10 | nM | <10 | nM | <10 | nM | 10-100 | nM | Group B | 7.59 | 19.1 | 9.16 | SEQ ID NO: |
| | | | | | | | | | | | | | 1149 |
| 5p-121 | <10 | nM | <10 | nM | <10 | nM | >8 | μM | Group B | 166 | | | SEQ ID NO: |
| | | | | | | | | | | | | | 1150 |
| 5p-124 | <10 | nM | <10 | nM | 10 | nM | >8 | μM | Group B | 4.6 | | | SEQ ID NO: |
| | | | | | | | | | | | | | 1153 |
| 5p-125 | <10 | nM | 10-100 | nM | <10 | nM | >8 | μM | Group B | 22 | | | SEQ ID NO: |
| | | | | | | | | | | | | | 1154 |
| 5p-126 | <10 | nM | <10 | nM | <10 | nM | 1-8 | μM | Group B | 21 | | | SEQ ID NO: |
| | | | | | | | | | | | | | 1155 |
| 5p-127 | <10 | nM | <10 | nM | 10-100 | nM | >8 | μM | Group B | 12.8 | 44.5 | 36.5 | SEQ ID NO: |
| | | | | | | | | | | | | | 1156 |
| 5p-128 | <10 | nM | 10-100 | nM | >8 | μM | >8 | μM | Group B | 43.6 | | | SEQ ID NO: |
| | | | | | | | | | | | | | 1157 |
| 5p-132 | <10 | nM | 0.1-1 | μM | <10 | nM | <10 | nM | Group C | 104 | 42.8 | 211 | SEQ ID NO: |
| | | | | | | | | | | | | | 1161 |
| 5p-156 | <10 | nM | 10-100 | nM | >8 | μM | >8 | μM | Group E | >2500 | | | SEQ ID NO: |
| | | | | | | | | | | | | | 1185 |
| 5p-162 | 10-100 | nM | 10-100 | nM | 1-8 | μM | 0.1-1 | μM | Group C | >2500 | | | SEQ ID NO: |
| | | | | | | | | | | | | | 1191 |
| 5p-164 | <10 | nM | 10-100 | nM | 10-100 | nM | >8 | μM | Group E | >2500 | | | SEQ ID NO: |
| | | | | | | | | | | | | | 1193 |
| 5p-165 | <10 | nM | 10-100 | nM | >8 | μM | >8 | μM | Group E | >2500 | | | SEQ ID NO: |
| | | | | | | | | | | | | | 1194 |
| 5p-167 | <10 | nM | >8 | μM | 10-100 | nM | >8 | μM | Group D | 185 | 263 | 74.5 | SEQ ID NO: |
| | | | | | | | | | | | | | 1196 |
| 5p-168 | <10 | nM | <10 | nM | 10-100 | nM | >8 | μM | Group B | 0.45 | 0.36 | 2.25 | SEQ ID NO: |
| | | | | | | | | | | | | | 1197 |
| 5p-169 | <10 | nM | <10 | nM | 1-8 | μM | >8 | μM | Group B | 0.8 | | | SEQ ID NO: |
| | | | | | | | | | | | | | 1198 |
| 5p-171 | <10 | nM | 10-100 | nM | 0.1-1 | μM | 10-100 | nM | Group E | >2500 | | | SEQ ID NO: |
| | | | | | | | | | | | | | 1200 |
| 5p-174 | <10 | nM | <10 | nM | 10-100 | nM | 10-100 | nM | Group D | >2500 | | | SEQ ID NO: |
| | | | | | | | | | | | | | 1203 |
| 5p-175 | <10 | nM | <10 | nM | 10-100 | nM | 10-100 | nM | Group C | >2500 | 8657 | 8913 | SEQ ID NO: |
| | | | | | | | | | | | | | 1204 |
| 5p-176 | <10 | nM | <10 | nM | 10-100 | nM | 10-100 | nM | Group D | >2500 | | | SEQ ID NO: |
| | | | | | | | | | | | | | 1205 |
| 5p-179 | <10 | nM | >8 | μM | >8 | μM | 0.1-1 | μM | Group C | 480 | | | SEQ ID NO: |
| | | | | | | | | | | | | | 1208 |
| 5p-180 | <10 | nM | >8 | μM | >8 | μM | 1-8 | μM | Group C | 512 | | | SEQ ID NO: |
| | | | | | | | | | | | | | 1209 |
| 5p-182 | <10 | nM | 1-8 | μM | 1-8 | μM | >8 | μM | Group A | 0.077 | 0.35 | 0.31 | SEQ ID NO: |
| | | | | | | | | | | | | | 1211 |
| 4P-1 | 10-100 | nM | 1-8 | μM | >8 | μM | >8 | μM | Group D | >2500 | | | SEQ ID NO: |
| | | | | | | | | | | | | | 1090 |
| 4P-3 | 10-100 | nM | 1-8 | μM | >8 | μM | >8 | μM | Group E | >2500 | | | SEQ ID NO: |
| | | | | | | | | | | | | | 1091 |
| 4P-4 | 10-100 | nM | 0.1-1 | μM | >8 | μM | >8 | μM | Group E | >2500 | | | SEQ ID NO: |
| | | | | | | | | | | | | | 1092 |
| 4P-5 | 10-100 | nM | 0.1-1 | μM | >8 | μM | >8 | μM | Group E | >2500 | | | SEQ ID NO: |
| | | | | | | | | | | | | | 1093 |
| 4P-9 | <10 | nM | 0.1-1 | μM | >8 | μM | >8 | μM | Group E | >2500 | | | SEQ ID NO: |
| | | | | | | | | | | | | | 1220 |
| 4P-10 | <10 | nM | 0.1-1 | μM | >8 | μM | >8 | μM | Group E | >2500 | | | SEQ ID NO: |
| | | | | | | | | | | | | | 1221 |
| 4P-12 | <10 | nM | 10-100 | nM | 0.1-1 | μM | 0.1-1 | μM | Group E | >2500 | | | SEQ ID NO: |
| | | | | | | | | | | | | | 1222 |
| 4P-17 | <10 | nM | 1-8 | μM | <10 | nM | >8 | μM | Group B | 20 | | | SEQ ID NO: |
| | | | | | | | | | | | | | 1097 |
| 4P-19 | <10 | nM | 0.1-1 | μM | 0.1-1 | μM | >8 | μM | Group B | 58 | | | SEQ ID NO: |
| | | | | | | | | | | | | | 1098 |
| 4P-21 | <10 | nM | <10 | nM | 10-100 | nM | 1-8 | μM | Group E | >2500 | | | SEQ ID NO: |
| | | | | | | | | | | | | | 1099 |
| 4P-26 | <10 | nM | >8 | μM | 1-8 | μM | >8 | μM | Group D | >2500 | | | SEQ ID NO: |
| | | | | | | | | | | | | | 1229 |
| 4P-28 | 10-100 | nM | 1-8 | μM | 0.1-1 | μM | 1-8 | μM | Group C | 236 | | | SEQ ID NO: |
| | | | | | | | | | | | | | 1100 |
| 4P-32 | <10 | nM | 1-8 | μM | >8 | μM | >8 | μM | Group C | 95 | | | SEQ ID NO: |
| | | | | | | | | | | | | | 1234 |
| 4P-42 | <10 | nM | <10 | nM | <10 | nM | 1-8 | μM | Group B | 18.6 | | | SEQ ID NO: |
| | | | | | | | | | | | | | 1237 |
| 4P-44 | <10 | nM | 0.1-1 | μM | 10-100 | nM | >8 | μM | Group B | 128 | | | SEQ ID NO: |
| | | | | | | | | | | | | | 1103 |
| 4P-46 | <10 | nM | 10-100 | nM | 1-8 | μM | >8 | μM | Group B | 86.4 | | | SEQ ID NO: |
| | | | | | | | | | | | | | 1240 |
| 4P-47 | <10 | nM | <10 | nM | <10 | nM | >8 | μM | Group B | 6.43 | 13.1 | 9.54 | SEQ ID NO: |
| | | | | | | | | | | | | | 1241 |
| 4P-56 | <10 | nM | 10-100 | nM | <10 | nM | <10 | nM | Group D | 2000 | | | SEQ ID NO: |
| | | | | | | | | | | | | | 1249 |
| 4P-61 | <10 | nM | 10-100 | nM | 0.1-1 | μM | >8 | μM | Group E | >2500 | | | SEQ ID NO: |
| | | | | | | | | | | | | | 1105 |
| 4P-71 | <10 | nM | 10-100 | nM | <10 | nM | >8 | μM | Group B | 33 | | | SEQ ID NO: |
| | | | | | | | | | | | | | 1106 |
| 4P-74 | <10 | nM | >8 | μM | >8 | μM | 10-100 | nM | Group B | 0.478 | | | SEQ ID NO: |
| | | | | | | | | | | | | | 1276 |
| 4P-76 | 10-100 | nM | 1-8 | μM | 1-8 | μM | 10-100 | nM | Group B | 900 | | | SEQ ID NO: |
| | | | | | | | | | | | | | 1278 |
| 4P-84 | <10 | nM | <10 | nM | >8 | μM | >8 | μM | Group B | 4 | | | SEQ ID NO: |
| | | | | | | | | | | | | | 1286 |
| 4P-85 | <10 | nM | <10 | nM | >8 | μM | >8 | μM | Group B | 0.67 | | | SEQ ID NO: |
| | | | | | | | | | | | | | 1287 |
| 4P-86 | <10 | nM | <10 | nM | >8 | μM | >8 | μM | Group B | 0.72 | | | SEQ ID NO: |
| | | | | | | | | | | | | | 1288 |
| 4P-89 | <10 | nM | 10-100 | nM | 0.1-1 | μM | 0.1-1 | μM | Group E | >2500 | | | SEQ ID NO: |
| | | | | | | | | | | | | | 1291 |
| 4P-92 | <10 | nM | 1-8 | μM | 1-8 | μM | >8 | μM | Group A | 4.6 | | | SEQ ID NO: |
| | | | | | | | | | | | | | 1294 |
| R113 | <10 | nM | 10-100 | nM | <10 | nM | <10 | nM | Group D | 252 | 1106 | 146 | SEQ ID NO: |
| | | | | | | | | | | | | | 2117 |
| R37 | <10 | nM | <10 | nM | <10 | nM | >8 | μM | Group B | 11.8 | 8.36 | 40.2 | SEQ ID NO: |
| | | | | | | | | | | | | | 1096 |
| R117 | <10 | nM | 0.1-1 | μM | 10-100 | nM | >8 | μM | Group B | 88 | | | SEQ ID NO: |
| | | | | | | | | | | | | | 2118 |
| R58 | 10-100 | nM | 1-8 | μM | 0.1-1 | μM | 1-8 | μM | Group D | >2500 | | | SEQ ID NO: |
| | | | | | | | | | | | | | 2119 |

1. A nanobody comprising one or more complementarity determining regions 3 (CDR3), wherein the CDR3 comprises an amino acid sequence selected from the group consisting of SEQ ID NO: 1 through SEQ ID NO: 1057.

2. The nanobody of claim 1, wherein the nanobody comprises a multimer of one or more CDR3s, wherein the CDR3 comprises an amino acid sequence selected from the group consisting of SEQ ID NO:1 through SEQ ID NO: 1057.

3. The nanobody of claim 1, wherein the nanobody comprises a multimer of one or more amino acid sequences comprising a sequence selected from the group consisting of SEQ ID NO: 1058 through SEQ ID NO: 2114 and SEQ ID NO: 2117 through SEQ ID NO: 2119.

4. The nanobody of claim 1, wherein the nanobody comprises a multimer of one or more amino acid sequences comprising a sequence selected from the group consisting of SEQ ID NO: 1058-1072, 1074, 1075, 1077, 1078, 1079, 1080, 1082, 1083, 1084, 1085, 1086, 1087, 1089, 1090, 1091, 1092, 1093, 1096, 1097, 1098, 1099, 1100, 1103, 1105, 1106, 1111, 1118, 1122, 1127, 1128, 1129, 1130, 1132, 1133, 1134, 1138, 1146, 1147, 1148, 1149, 1150, 1153, 1154, 1155, 1156, 1157, 1161, 1185, 1191, 1193, 1194, 1196, 1197, 1198, 1200, 1203, 1204, 1205, 1208, 1209, 1211, 1220, 1221, 1222, 1229, 1234, 1237, 1240, 1241, 1249, 1260, 1261, 1262, 1271, 1274, 1276, 1278, 1286, 1287, 1288, 1291, 1294, 2117, 2118, and 2119.

5. The nanobody of claim 1, wherein the nanobody is a homotrimer comprising three copies of one amino acid sequence, wherein the one amino acid sequence comprises a sequence selected from the group consisting of SEQ ID NO: 1058 through SEQ ID NO: 2114 and SEQ ID NO: 2117 through SEQ ID NO: 2119.

6. The nanobody of claim 5, wherein the nanobody is a homotrimer comprising three copies of one amino acid sequence, wherein the one amino acid sequence comprises a sequence selected from the group consisting of SEQ ID NO: 1058-1072, 1074, 1075, 1077, 1078, 1079, 1080, 1082, 1083, 1084, 1085, 1086, 1087, 1089, 1090, 1091, 1092, 1093, 1096, 1097, 1098, 1099, 1100, 1103, 1105, 1106, 1111, 1118, 1122, 1127, 1128, 1129, 1130, 1132, 1133, 1134, 1138, 1146, 1147, 1148, 1149, 1150, 1153, 1154, 1155, 1156, 1157, 1161, 1185, 1191, 1193, 1194, 1196, 1197, 1198, 1200, 1203, 1204, 1205, 1208, 1209, 1211, 1220, 1221, 1222, 1229, 1234, 1237, 1240, 1241, 1249, 1260, 1261, 1262, 1271, 1274, 1276, 1278, 1286, 1287, 1288, 1291, 1294, 2117, 2118, and 2119.

7. The nanobody of claim 5, wherein the nanobody comprises a sequence of SEQ ID NO: 1147.

8. The nanobody of claim 5, wherein the nanobody comprises a sequence of SEQ ID NO: 1161.

9. The nanobody of claim 1, wherein the nanobody is a heterotrimer comprising three different amino acid sequences, wherein each different amino acid sequence comprises a sequence selected from the group consisting of SEQ ID NO: 1058 through SEQ ID NO: 2114 and SEQ ID NO: 2117 through SEQ ID NO: 2119.

10. The nanobody of claim 9, wherein the nanobody is a heterotrimer comprising three different amino acid sequences, wherein each different amino acid sequence comprises a sequence selected from the group consisting of SEQ ID NO: 1058-1072, 1074, 1075, 1077, 1078, 1079, 1080, 1082, 1083, 1084, 1085, 1086, 1087, 1089, 1090, 1091, 1092, 1093, 1096, 1097, 1098, 1099, 1100, 1103, 1105, 1106, 1111, 1118, 1122, 1127, 1128, 1129, 1130, 1132, 1133, 1134, 1138, 1146, 1147, 1148, 1149, 1150, 1153, 1154, 1155, 1156, 1157, 1161, 1185, 1191, 1193, 1194, 1196, 1197, 1198, 1200, 1203, 1204, 1205, 1208, 1209, 1211, 1220, 1221, 1222, 1229, 1234, 1237, 1240, 1241, 1249, 1260, 1261, 1262, 1271, 1274, 1276, 1278, 1286, 1287, 1288, 1291, 1294, 2117, 2118, and 2119.

11. The nanobody of claim 1, wherein the nanobody is a homodimer comprising two copies of one amino acid sequence, wherein the one amino acid sequence comprises a sequence selected from the group consisting of SEQ ID NO: 1058 through SEQ ID NO: 2114 and SEQ ID NO: 2117 through SEQ ID NO: 2119.

12. The nanobody of claim 11, wherein the nanobody is a homodimer comprising two copies of one amino acid sequence, wherein the one amino acid sequence comprises a sequence selected from the group consisting of SEQ ID NO: 1058-1072, 1074, 1075, 1077, 1078, 1079, 1080, 1082, 1083, 1084, 1085, 1086, 1087, 1089, 1090, 1091, 1092, 1093, 1096, 1097, 1098, 1099, 1100, 1103, 1105, 1106, 1111, 1118, 1122, 1127, 1128, 1129, 1130, 1132, 1133, 1134, 1138, 1146, 1147, 1148, 1149, 1150, 1153, 1154, 1155, 1156, 1157, 1161, 1185, 1191, 1193, 1194, 1196, 1197, 1198, 1200, 1203, 1204, 1205, 1208, 1209, 1211, 1220, 1221, 1222, 1229, 1234, 1237, 1240, 1241, 1249, 1260, 1261, 1262, 1271, 1274, 1276, 1278, 1286, 1287, 1288, 1291, 1294, 2117, 2118, and 2119.

13. The nanobody of claim 1, wherein the nanobody is a heterodimer comprising two different amino acid sequences, wherein each different amino acid sequence comprises a sequence selected from the group consisting of SEQ ID NO: 1058 through SEQ ID NO: 2114 and SEQ ID NO: 2117 through SEQ ID NO: 2119.

14. The nanobody of claim 13, wherein the nanobody is a heterodimer comprising two different amino acid sequences, wherein each different amino acid sequence comprises a sequence selected from the group consisting of SEQ ID NO: 1058-1072, 1074, 1075, 1077, 1078, 1079, 1080, 1082, 1083, 1084, 1085, 1086, 1087, 1089, 1090, 1091, 1092, 1093, 1096, 1097, 1098, 1099, 1100, 1103, 1105, 1106, 1111, 1118, 1122, 1127, 1128, 1129, 1130, 1132, 1133, 1134, 1138, 1146, 1147, 1148, 1149, 1150, 1153, 1154, 1155, 1156, 1157, 1161, 1185, 1191, 1193, 1194, 1196, 1197, 1198, 1200, 1203, 1204, 1205, 1208, 1209, 1211, 1220, 1221, 1222, 1229, 1234, 1237, 1240, 1241, 1249, 1260, 1261, 1262, 1271, 1274, 1276, 1278, 1286, 1287, 1288, 1291, 1294, 2117, 2118, and 2119.

15. The nanobody of claim 13, wherein the heterodimer comprises SEQ ID NO: 1147 and SEQ ID NO: 1161.

16. The nanobody of claim 1, wherein the nanobody comprises a sequence of SEQ ID NO: 1075, SEQ ID NO: 1078, SEQ ID NO: 1084, SEQ ID NO: 1086, SEQ ID NO: 1122, SEQ ID NO: 1147, SEQ ID NO: 1161, SEQ ID NO: 1208, SEQ ID NO: 1211, SEQ ID NO: 1249, SEQ ID NO: 1276, SEQ ID NO: 2117, or SEQ ID NO: 2118.

17. The nanobody of claim 1, wherein the nanobody comprises an amino acid sequence having the same amino acids residues at positions 30, 31, 32, 33, 47, 48, 49, 50, 51, 52, 53, 54, 55, 56, 57, 58, 59, 60, 61, 62, 63, 105, 106, 107, 108, 109, 110 and 114 relative to SEQ ID NO: 1211, and wherein the nanobody specifically binds to amino acids at positions 453, 455, 456, 472, 473, 475, 476, 477, 483, 484, 485, 486, 487, 488, 489, 490, 491, 492 and 493 of SEQ ID NO: 2120.

18. The nanobody of claim 1, wherein the nanobody comprises an amino acid sequence having the same amino acids residues at positions 1, 2, 3, 25, 26, 27, 28, 29, 30, 31, 32, 33, 52, 53, 54, 74, 100, 101, 102, 103, 104, 105, 106, 111, 113 and 114 relative to SEQ ID NO: 1276, and wherein the nanobody specifically binds to amino acids at positions 364, 365, 366, 367, 369, 370, 371, 372, 374, 375, 376, 377, 378, 379, 380, 381, 382, 383, 384, 385, 386, 387, 388, 389, 407, 408, 409, 410, 411, 412, 413, 414, 429, 431, 432, 433, 435 and 526 of SEQ ID NO: 2120.

19. The nanobody of claim 1, wherein the nanobody comprises an amino acid sequence having the same amino acids residues at positions 1, 2, 28, 29, 30, 31, 32, 33, 57, 59, 98, 99, 100, 101, 102, 103, 104, 108, 109, 110, and 111 relative to SEQ ID NO: 2118, and wherein the nanobody specifically binds to amino acids at positions 368, 369, 370, 371, 374, 376, 377, 378, 379, 380, 381, 382, 383, 384, 385, 408, 410, 411, 412, 413, 414, 415, 426, 427, 428, 429 and 430 of SEQ ID NO: 2120.

20. The nanobody of claim 1, wherein the nanobody comprises an amino acid sequence having the same amino acids residues at positions 1, 2, 26, 30, 31, 32, 52, 56, 98, 99, 100, 101, 102, 103, 104, 107, 108, 109 and 110 relative to SEQ ID NO: 1078, and wherein the nanobody specifically binds to amino acids at positions 369, 372, 377, 378, 379, 380, 381, 382, 383, 384, 385, 386, 411, 412, 413, 414, 415, 427, 428, and 429 of SEQ ID NO: 2120.

21. The nanobody of claim 1, wherein the nanobody comprises an amino acid sequence having the same amino acids residues at positions 47, 52, 53, 54, 56, 57, 58, 59, 60, 61, 62, 65, 99, 100, 101, 102, 103, 104, 105, 106, 107, 108, 109, 110, 111, 112, 113 and 114 relative to SEQ ID NO: 1084, and wherein the nanobody specifically binds to amino acids at positions 368, 369, 370, 371, 372, 373, 374, 375, 376, 377, 378, 379, 380, 381, 382, 383, 384, 385, 386, 404, 405, 407, 408, 411, 412, 432, 433, 434, 435, 436, 437, 503, 504, 508 and 510 of SEQ ID NO: 2120.

22. The nanobody of claim 1, wherein the nanobody comprises an amino acid sequence having the same amino acids residues at positions 1, 2, 28, 31, 32, 99, 100, 101, 102, 103, 104, 106, 107, 110, 111, 112, 113, 114, 115, 116 and 117 relative to SEQ ID NO: 1075, and wherein the nanobody specifically binds to amino acids at positions 375, 376, 377, 378, 379, 380, 381, 382, 383, 384, 385, 386, 387, 408, 410, 411, 412, 413, 414, 415, 416, 426, 427, 428, 429, 430, 431 and 432 of SEQ ID NO: 2120.

23. The nanobody of claim 1, wherein the nanobody comprises an amino acid sequence having the same amino acids residues at positions 2, 26, 28, 30, 31, 32, 52, 53, 54, 99, 100, 101, 102, 103, 104, 107, 112, 113, 114, 115, 116 and 117 relative to SEQ ID NO: 1147, and wherein the nanobody specifically binds to amino acids at positions 369, 370, 374, 375, 376, 377, 378, 379, 380, 381, 382, 383, 384, 385, 390, 408, 410, 411, 412, 413, 414, 426, 427, 428, 429 and 430 of SEQ ID NO: 2120.

24. The nanobody of claim 1, wherein the nanobody comprises an amino acid sequence having the same amino acids residues at positions 31, 52, 56, 57, 100, 101, 102, 103, 104, 105, 106, 107, 108, 109, 110, 111, 112, 113, 114 and 115 relative to SEQ ID NO: 1122, and wherein the nanobody specifically binds to amino acids at positions 337, 340, 346, 348, 349, 351, 352, 353, 354, 355, 356, 357, 358, 359, 394, 396, 454, 464, 465, 466, 467, 468, 469 and 516 of SEQ ID NO: 2120.

25. The nanobody of claim 1, wherein the nanobody comprises an amino acid sequence having the same amino acids residues at positions 33, 38, 43, 44, 46, 47, 50, 56, 57, 58, 59, 60, 61, 62, 63, 64, 65, 101, 102, 103, 104, 105 and 106 relative to SEQ ID NO: 1249, and wherein the nanobody specifically binds to amino acids at positions 357, 380, 381, 382, 393, 394, 396, 426, 427, 428, 429, 430, 462, 463, 516, 517, 518, 519, 520, 521, 522 and 523 of SEQ ID NO: 2120.

26. The nanobody of claim 1, wherein the nanobody comprises an amino acid sequence having the same amino acids residues at positions 1, 2, 26, 27, 28, 30, 31, 32, 52, 53, 54, 97, 98, 99, 100, 101, 102, 103, 104, 105, 107, 108, 109, 110 and 111 relative to SEQ ID NO: 1161 and wherein the nanobody specifically binds to amino acids at positions 380, 381, 382, 386, 387, 389, 390, 391, 392, 393, 426, 428, 429, 430, 431, 462, 464, 513, 514, 515, 516, 517, 518, 519, 520, 521, 522, 52 and 525 of SEQ ID NO: 2120.

27. The nanobody of claim 1, wherein the nanobody comprises an amino acid sequence having the same amino acids residues at positions 27, 28, 29, 30, 31, 32, 33, 50, 52, 53, 54, 55, 56, 58, 60, 100, 101, 102, 103, 104, 105, 106, 107, 110 and 111 relative to SEQ ID NO: 2117 and wherein the nanobody specifically binds to amino acids at positions 355, 380, 381, 382, 383, 385, 386, 387, 388, 389, 390, 391, 392, 393, 394, 396, 426, 427, 428, 429, 430, 462, 463, 464, 465, 515, 516, 517, 518, 519, 520, 521 and 522 of SEQ ID NO: 2120.

28. The nanobody of claim 1, wherein the nanobody comprises an amino acid sequence having the same amino acids residues at positions 46, 48, 115, 116, 117, 118, 119, 120, 121, 122, 123, 124 and 125 relative to SEQ ID NO: 1208 and wherein the nanobody specifically binds to amino acids at positions 355, 396, 426, 428, 429, 430, 431, 463, 464, 514, 515, 516, 517, 518, 519 and 520 of SEQ ID NO: 2120.

29. The nanobody of claim 1, wherein the nanobody comprises an amino acid sequence having the same amino acids residues at positions 45, 47, 49, 57, 58, 59, 60, 61, 65, 99, 101, 103, 104, 105, 106, 107, 108, 109, 110, 111, 112, 113 and 115 relative to SEQ ID NO: 1086 and wherein the nanobody specifically binds to amino acids at positions 333, 334, 336, 359, 360, 361, 362, 363, 364, 365, 382, 384, 386, 387, 388, 389, 390, 391, 392, 393, 517, 518, 519, 520, 521, 522, 523, 524, 525 and 526 of SEQ ID NO: 2120.

30. (canceled)

31. (canceled)

32. (canceled)

33. (canceled)

34. (canceled)

35. A method of treating a coronavirus infection in a subject comprising administering to the subject a therapeutically effective amount of a nanobody of claim 1.

36. (canceled)

37. The method of claim 35, wherein the coronavirus is a sarbecovirus.

38. The method of claim 37, wherein the sarbecovirus is SARS-CoV-2 or SARS-CoV.

39. The method of claim 35, wherein the nanobody is conjugated or linked to a human serum albumin binding nanobody or nanobody fragment and the conjugate has an increased serum half-life or in vivo stability as compared to a control.

40. A method of preventing a coronavirus infection in a subject comprising administering to the subject a therapeutically effective amount of a nanobody of claim 1.

41. (canceled)

42. The method of claim 40, wherein the coronavirus is a sarbecovirus.

43. The method of claim 42, wherein the sarbecovirus is SARS-CoV-2 or SARS-CoV.

44. The method of claim 40, wherein the nanobody is conjugated or linked to a human serum albumin binding nanobody or nanobody fragment and the conjugate has an increased serum half-life or in vivo stability as compared to a control.

The application's sequence listing, which the Patent Office published only in electronic form, follows.

SEQUENCE LISTING (2130 sequences)

SEQ ID NO: 1 - protein, 20 aa, synthetic construct
  REGION 1..20: note = Synthetic Construct
AHARVYGANWSSSNRDDYDS

SEQ ID NO: 2 - protein, 20 aa, synthetic construct
  REGION 1..20: note = Synthetic Construct
AHGRVYGANWSSTNRYDYDS

SEQ ID NO: 3 - protein, 19 aa, synthetic construct
  REGION 1..19: note = Synthetic Construct
AKTTDWVTRAPREMHEYAY

SEQ ID NO: 4 - protein, 15 aa, synthetic construct
  REGION 1..15: note = Synthetic Construct
ARTAGLTSNPSLYDY

SEQ ID NO: 5 - protein, 20 aa, synthetic construct
  REGION 1..20: note = Synthetic Construct
ATARVYGANWSSSNRDDYDS

SEQ ID NO: 6 - protein, 18 aa, synthetic construct
  REGION 1..18: note = Synthetic Construct
DANSLRYGYSQNQGRYEY

SEQ ID NO: 7 - protein, 15 aa, synthetic construct
  REGION 1..15: note = Synthetic Construct
DLTVLLTANPGHYKY

SEQ ID NO: 8 - protein, 14 aa, synthetic construct
  REGION 1..14: note = Synthetic Construct
DPTAQNMGIRDPPY

SEQ ID NO: 9 - protein, 18 aa, synthetic construct
  REGION 1..18: note = Synthetic Construct
DQTPLRFSYSLSRDKYDY

SEQ ID NO: 10 - protein, 18 aa, synthetic construct
  REGION 1..18: note = Synthetic Construct
DQTPLRYAYSTRSQDYDY

SEQ ID NO: 11 - protein, 18 aa, synthetic construct
  REGION 1..18: note = Synthetic Construct
DRAILYHGLSQRTQAYAY

SEQ ID NO: 12 - protein, 18 aa, synthetic construct
  REGION 1..18: note = Synthetic Construct
DRSPLFWGMSQSHGEYDY

SEQ ID NO: 13 - protein, 18 aa, synthetic construct
  REGION 1..18: note = Synthetic Construct
DRTILYHAISQRTQNYQY

SEQ ID NO: 14 - protein, 18 aa, synthetic construct
  REGION 1..18: note = Synthetic Construct
DSSPLRYGLSYSSNRYDY

SEQ ID NO: 15 - protein, 16 aa, synthetic construct
  REGION 1..16: note = Synthetic Construct
DSTLDRLHSAESDYRY

SEQ ID NO: 16 - protein, 16 aa, synthetic construct
  REGION 1..16: note = Synthetic Construct
ERGYSLMYYRSSEYTY

SEQ ID NO: 17 - protein, 18 aa, synthetic construct
  REGION 1..18: note = Synthetic Construct
GGNHYSPSKYYIADEYDY

SEQ ID NO: 18 - protein, 18 aa, synthetic construct
  REGION 1..18: note = Synthetic Construct
GGNHYSRSKYYNLDEYDD

SEQ ID NO: 19 - protein, 18 aa, synthetic construct
  REGION 1..18: note = Synthetic Construct
GGNHYSRSKYYTADEYDY

SEQ ID NO: 20 - protein, 13 aa, synthetic construct
  REGION 1..13: note = Synthetic Construct
GGWGIRQPIEVDY

SEQ ID NO: 21 - protein, 13 aa, synthetic construct
  REGION 1..13: note = Synthetic Construct
GGWGIRQPIIVDY

SEQ ID NO: 22 - protein, 15 aa, synthetic construct
  REGION 1..15: note = Synthetic Construct
GLTVLLTANPAHYNY

SEQ ID NO: 23 - protein, 18 aa, synthetic construct
  REGION 1..18: note = Synthetic Construct
LEAPLLHLIATQRRQYEY

SEQ ID NO: 24 - protein, 20 aa, synthetic construct
  REGION 1..20: note = Synthetic Construct
RGEPFYFGADDAKKPDNYGI

SEQ ID NO: 25 - protein, 12 aa, synthetic construct
  REGION 1..12: note = Synthetic Construct
RQGCSYNGCDEY

SEQ ID NO: 26 - protein, 17 aa, synthetic construct
  REGION 1..17: note = Synthetic Construct
RRDDSWGYSRQSIEYDY

SEQ ID NO: 27 - protein, 17 aa, synthetic construct
  REGION 1..17: note = Synthetic Construct
RRDSSWGYSRQSTEYDY

SEQ ID NO: 28 - protein, 15 aa, synthetic construct
  REGION 1..15: note = Synthetic Construct
RRGPLITTSRLHYDF

SEQ ID NO: 29 - protein, 18 aa, synthetic construct
  REGION 1..18: note = Synthetic Construct
RSVIQYGIVPGNDFHYEY

SEQ ID NO: 30 - protein, 15 aa, synthetic construct
  REGION 1..15: note = Synthetic Construct
SRTAGLTSNRFLYDS

SEQ ID NO: 31 - protein, 13 aa, synthetic construct
  REGION 1..13: note = Synthetic Construct
GGWGIRQVIEVDY

SEQ ID NO: 32 - protein, 13 aa, synthetic construct
  REGION 1..13: note = Synthetic Construct
GGWGLTQPIIVDY

SEQ ID NO: 33 - protein, 20 aa, synthetic construct
  REGION 1..20: note = Synthetic Construct
AHARVYGANWSSSNRYDYDS

SEQ ID NO: 34 - protein, 14 aa, synthetic construct
  REGION 1..14: note = Synthetic Construct
DFTAQNGGIRNPTY

SEQ ID NO: 35 - protein, 14 aa, synthetic construct
  REGION 1..14: note = Synthetic Construct
DFTAQNRGIRIPRY

SEQ ID NO: 36 - protein, 14 aa, synthetic construct
  REGION 1..14: note = Synthetic Construct
DFTVQNGGIRNPTY

SEQ ID NO: 37 - protein, 18 aa, synthetic construct
  REGION 1..18: note = Synthetic Construct
DLSALWHGIPTTARQYDS

SEQ ID NO: 38 - protein, 20 aa, synthetic construct
  REGION 1..20: note = Synthetic Construct
DPWGGVRDGPSAAAIRTYDY

SEQ ID NO: 39 - protein, 16 aa, synthetic construct
  REGION 1..16: note = Synthetic Construct
DRGSSYYYTRASEYTY

SEQ ID NO: 40 - protein, 16 aa, synthetic construct
  REGION 1..16: note = Synthetic Construct
DRGYSLMYYSSREYTY

SEQ ID NO: 41 - protein, 19 aa, synthetic construct
  REGION 1..19: note = Synthetic Construct
DRSIFQSYYSAKYPNNYEY

SEQ ID NO: 42 - protein, 18 aa, synthetic construct
  REGION 1..18: note = Synthetic Construct
DRSPLFFGVPRSHGEYDY

SEQ ID NO: 43 - protein, 20 aa, synthetic construct
  REGION 1..20: note = Synthetic Construct
DTAGRTQYGSSWSTLDGFVY

SEQ ID NO: 44 - protein, 11 aa, synthetic construct
  REGION 1..11: note = Synthetic Construct
ETYSIYEKDDS

SEQ ID NO: 45 - protein, 18 aa, synthetic construct
  REGION 1..18: note = Synthetic Construct
GEWCSTRARAPVMEGVHH

SEQ ID NO: 46 - protein, 18 aa, synthetic construct
  REGION 1..18: note = Synthetic Construct
GGNHYSRSKYYTADEYDY

SEQ ID NO: 47 - protein, 13 aa, synthetic construct
  REGION 1..13: note = Synthetic Construct
GIPMSTVLLGQGF

SEQ ID NO: 48 - protein, 6 aa, synthetic construct
  REGION 1..6: note = Synthetic Construct
IVGTYP

SEQ ID NO: 49 - protein, 18 aa, synthetic construct
  REGION 1..18: note = Synthetic Construct
GGNHYDPSRYYTADEYDY

SEQ ID NO: 50 - protein, 20 aa, synthetic construct
  REGION 1..20: note = Synthetic Construct
AHARVYGANWSSSNRYDYDS

SEQ ID NO: 51 - protein, 15 aa, synthetic construct
  REGION 1..15: note = Synthetic Construct
ADGVIDGTSANAYRY

SEQ ID NO: 52 - protein, 15 aa, synthetic construct
  REGION 1..15: note = Synthetic Construct
AFRGLPTTDASQYDD

SEQ ID NO: 53 - protein, 18 aa, synthetic construct
  REGION 1..18: note = Synthetic Construct
AGTAFSSIDLTRVSDYTY

SEQ ID NO: 54 - protein, 20 aa, synthetic construct
  REGION 1..20: note = Synthetic Construct
AHARVYGANWSSSNRNDYDA

SEQ ID NO: 55 - protein, 13 aa, synthetic construct
  REGION 1..13: note = Synthetic Construct
AIREGYSDFFYDY

SEQ ID NO: 56 - protein, 13 aa, synthetic construct
  REGION 1..13: note = Synthetic Construct
AIREGYSDFFYDY

SEQ ID NO: 57 - protein, 21 aa, synthetic construct
  REGION 1..21: note = Synthetic Construct
ALRSDGQRTVIAGCPIRYFDS

SEQ ID NO: 58 - protein, 22 aa, synthetic construct
  REGION 1..22: note = Synthetic Construct
APKSSITAAQAMGVMEGRDYHY

SEQ ID NO: 59 - protein, 22 aa, synthetic construct
  REGION 1..22: note = Synthetic Construct
APKSSLTAAQAMGVMEGREYAH

SEQ ID NO: 60 - protein, 14 aa, synthetic construct
  REGION 1..14: note = Synthetic Construct
AQGRYGSIWNDYDY

SEQ ID NO: 61 - protein, 20 aa, synthetic construct
  REGION 1..20: note = Synthetic Construct
AQTRVYGANWSSSNRDDYDA

SEQ ID NO: 62 - protein, 13 aa, synthetic construct
  REGION 1..13: note = Synthetic Construct
AVRRVSVSSALDK

SEQ ID NO: 63 - protein, 17 aa, synthetic construct
  REGION 1..17: note = Synthetic Construct
AWSYAEYVKNSYDDYNV

SEQ ID NO: 64 - protein, 18 aa, synthetic construct
  REGION 1..18: note = Synthetic Construct
AYTDHVYDLSTTATAFGA

SEQ ID NO: 65 - protein, 19 aa, synthetic construct
  REGION 1..19: note = Synthetic Construct
DENAHEDYFNSGFDRKYDY

SEQ ID NO: 66 - protein, 18 aa, synthetic construct
  REGION 1..18: note = Synthetic Construct
DISPFYCSWPLRTRLVEH

SEQ ID NO: 67 - protein, 18 aa, synthetic construct
  REGION 1..18: note = Synthetic Construct
DISPFYCSWPLRTRLVEY

SEQ ID NO: 68 - protein, 13 aa, synthetic construct
  REGION 1..13: note = Synthetic Construct
DLGYGLGPDRLSS

SEQ ID NO: 69 - protein, 13 aa, synthetic construct
  REGION 1..13: note = Synthetic Construct
DLGYGLGPDRLSS

SEQ ID NO: 70 - protein, 21 aa, synthetic construct
  REGION 1..21: note = Synthetic Construct
DLIDDYKSTYYYSTQPSSYDY

SEQ ID NO: 71 - protein, 22 aa, synthetic construct
  REGION 1..22: note = Synthetic Construct
DLLRRMLPGSSWWCLNQNDFGS

SEQ ID NO: 72 - protein, 22 aa, synthetic construct
  REGION 1..22: note = Synthetic Construct
DLMRGMFPGKSWWCLNKNDFGS

SEQ ID NO: 73 - protein, 18 aa, synthetic construct
  REGION 1..18: note = Synthetic Construct
DQAPLRFSYSMSRDKYDY

SEQ ID NO: 74 - protein, 11 aa, synthetic construct
  REGION 1..11: note = Synthetic Construct
DRSTVFRNPML

SEQ ID NO: 75 - protein, 11 aa, synthetic construct
  REGION 1..11: note = Synthetic Construct
DRTILYHAISQ

SEQ ID NO: 76 - protein, 18 aa, synthetic construct
  REGION 1..18: note = Synthetic Construct
DRTTLRHGYSTRSQNYDY

SEQ ID NO: 77 - protein, 18 aa, synthetic construct
  REGION 1..18: note = Synthetic Construct
DRTTLRHSYSTRSQDYDY

SEQ ID NO: 78 - protein, 18 aa, synthetic construct
  REGION 1..18: note = Synthetic Construct
DSRVSVELFATSFDAFEY

SEQ ID NO: 79 - protein, 18 aa, synthetic construct
  REGION 1..18: note = Synthetic Construct
DSRVSVELFATSFGAFDY

SEQ ID NO: 80 - protein, 18 aa, synthetic construct
  REGION 1..18: note = Synthetic Construct
DSRVSVELFVTSFGAFEY

SEQ ID NO: 81 - protein, 16 aa, synthetic construct
  REGION 1..16: note = Synthetic Construct
DSTLDRLHSAESDYPY

SEQ ID NO: 82 - protein, 14 aa, synthetic construct
  REGION 1..14: note = Synthetic Construct
DVATIGSRLANYDY

SEQ ID NO: 83 - protein, 21 aa, synthetic construct
  REGION 1..21: note = Synthetic Construct
EHARGFGGESNPNPSDLVYGA

SEQ ID NO: 84 - protein, 20 aa, synthetic construct
  REGION 1..20: note = Synthetic Construct
FSGRSQYYCSDYGSLREFDY

SEQ ID NO: 85 - protein, 9 aa, synthetic construct
  REGION 1..9: note = Synthetic Construct
FSMVDRTTN

SEQ ID NO: 86 - protein, 11 aa, synthetic construct
  REGION 1..11: note = Synthetic Construct
FSMVDRTTNWG

SEQ ID NO: 87 - protein, 13 aa, synthetic construct
  REGION 1..13: note = Synthetic Construct
GDPYGVGLRDYDY

SEQ ID NO: 88 - protein, 13 aa, synthetic construct
  REGION 1..13: note = Synthetic Construct
GDPYGVGMRDYKW

SEQ ID NO: 89 - protein, 18 aa, synthetic construct
  REGION 1..18: note = Synthetic Construct
GGNHYDPSKYYIADEYDY

SEQ ID NO: 90 - protein, 18 aa, synthetic construct
  REGION 1..18: note = Synthetic Construct
GGNHYDPSKYYTADEYDY

SEQ ID NO: 91 - protein, 18 aa, synthetic construct
  REGION 1..18: note = Synthetic Construct
GGNHYSRSKYYIADEYDY

SEQ ID NO: 92 - protein, 18 aa, synthetic construct
  REGION 1..18: note = Synthetic Construct
GGNHYSRSKYYNLDEYDY

SEQ ID NO: 93 - protein, 18 aa, synthetic construct
  REGION 1..18: note = Synthetic Construct
GGNHYSSSKYYIADEYDY

SEQ ID NO: 94 - protein, 10 aa, synthetic construct
  REGION 1..10: note = Synthetic Construct
GGNTYLPRDY

SEQ ID NO: 95 - protein, 10 aa, synthetic construct
  REGION 1..10: note = Synthetic Construct
GGNTYLPRDY

SEQ ID NO: 96 - protein, 13 aa, synthetic construct
  REGION 1..13: note = Synthetic Construct
GGWGIRQVIEVDY

SEQ ID NO: 97 - protein, 13 aa, synthetic construct
  REGION 1..13: note = Synthetic Construct
GGWGLRQPIEVDY

SEQ ID NO: 98 - protein, 13 aa, synthetic construct
  REGION 1..13: note = Synthetic Construct
GGWGLTQPIIVDY

SEQ ID NO: 99 - protein, 13 aa, synthetic construct
  REGION 1..13: note = Synthetic Construct
GGWGVRQPVEVDY

SEQ ID NO: 100 - protein, 13 aa, synthetic construct
  REGION 1..13: note = Synthetic Construct
GGWGVSQPIEVDY

SEQ ID NO: 101 - protein, 9 aa, synthetic construct
  REGION 1..9: note = Synthetic Construct
GHQGIGMDY

SEQ ID NO: 102 - protein, 11 aa, synthetic construct
  REGION 1..11: note = Synthetic Construct
GHQGIGMDYRG

SEQ ID NO: 103 - protein, 15 aa, synthetic construct
  REGION 1..15: note = Synthetic Construct
GIGDYMRDPYTATDT

SEQ ID NO: 104 - protein, 13 aa, synthetic construct
  REGION 1..13: note = Synthetic Construct
GIPMTTVLSGLGF

SEQ ID NO: 105 - protein, 15 aa, synthetic construct
  REGION 1..15: note = Synthetic Construct
GKFRLSVLCHPGQDY

SEQ ID NO: 106 - protein, 16 aa, synthetic construct
  REGION 1..16: note = Synthetic Construct
GPCTGPRAIAEVLYES

SEQ ID NO: 107 - protein, 22 aa, synthetic construct
  REGION 1..22: note = Synthetic Construct
GPKSSLTAAQAMGVMEGRDYVH

SEQ ID NO: 108 - protein, 14 aa, synthetic construct
  REGION 1..14: note = Synthetic Construct
GPRLEIGNYAQYEY

SEQ ID NO: 109 - protein, 16 aa, synthetic construct
  REGION 1..16: note = Synthetic Construct
GRAAIYPSAPLRFYDY

SEQ ID NO: 110 - protein, 16 aa, synthetic construct
  REGION 1..16: note = Synthetic Construct
GRAAIYPSAPLRFYEY

SEQ ID NO: 111 - protein, 16 aa, synthetic construct
  REGION 1..16: note = Synthetic Construct
GRAAIYPSAPLRSYDY

SEQ ID NO: 112 - protein, 13 aa, synthetic construct
  REGION 1..13: note = Synthetic Construct
GRIISTTPRDYDY

SEQ ID NO: 113 - protein, 13 aa, synthetic construct
  REGION 1..13: note = Synthetic Construct
GRIISTTPRDYEY

SEQ ID NO: 114 - protein, 13 aa, synthetic construct
  REGION 1..13: note = Synthetic Construct
GRIISTTPRNYEY

SEQ ID NO: 115 - protein, 12 aa, synthetic construct
  REGION 1..12: note = Synthetic Construct
GSGTFPRYEYDY

SEQ ID NO: 116 - protein, 14 aa, synthetic construct
  REGION 1..14: note = Synthetic Construct
GTSYMGSYHPSAGA

SEQ ID NO: 117 - protein, 15 aa, synthetic construct
  REGION 1..15: note = Synthetic Construct
GTTFGWGLRKLGYDD

SEQ ID NO: 118 - protein, 12 aa, synthetic construct
  REGION 1..12: note = Synthetic Construct
GVGTLSPFTAAS

SEQ ID NO: 119 - protein, 16 aa, synthetic construct
  REGION 1..16: note = Synthetic Construct
GYLYGTSPHAPYAYNY

SEQ ID NO: 120 - protein, 12 aa, synthetic construct
  REGION 1..12: note = Synthetic Construct
HDGNTAYRSGRY

SEQ ID NO: 121 - protein, 12 aa, synthetic construct
  REGION 1..12: note = Synthetic Construct
HILGTTASGRDL

SEQ ID NO: 122 - protein, 18 aa, synthetic construct
  REGION 1..18: note = Synthetic Construct
HSAPYTDYLPQQENEYAY

SEQ ID NO: 123 - protein, 5 aa, synthetic construct
  REGION 1..5: note = Synthetic Construct
IGTNF

SEQ ID NO: 124 - protein, 5 aa, synthetic construct
  REGION 1..5: note = Synthetic Construct
IGTNF

SEQ ID NO: 125 - protein, 18 aa, synthetic construct
  REGION 1..18: note = Synthetic Construct
IRGPSDDDCPDDRASGNY

SEQ ID NO: 126 - protein, 14 aa, synthetic construct
  REGION 1..14: note = Synthetic Construct
KDSTNVVIAWDYAY

SEQ ID NO: 127 - protein, 14 aa, synthetic construct
  REGION 1..14: note = Synthetic Construct
KILINGPGLREYDY

SEQ ID NO: 128 - protein, 16 aa, synthetic construct
  REGION 1..16: note = Synthetic Construct
KPRGVGLTDRISDYDY

SEQ ID NO: 129 - protein, 17 aa, synthetic construct
  REGION 1..17: note = Synthetic Construct
KQGPLYPYIYLSRGYDR

SEQ ID NO: 130 - protein, 15 aa, synthetic construct
  REGION 1..15: note = Synthetic Construct
LLRCDVSWPVSRFHS

SEQ ID NO: 131 - protein, 19 aa, synthetic construct
  REGION 1..19: note = Synthetic Construct
LTHAAYLTAKSADIMNLGV

SEQ ID NO: 132 - protein, 16 aa, synthetic construct
  REGION 1..16: note = Synthetic Construct
PFTTMWPGALAKNYDY

SEQ ID NO: 133 - protein, 16 aa, synthetic construct
  REGION 1..16: note = Synthetic Construct
PSEPYYRDRGASDYEY

SEQ ID NO: 134 - protein, 20 aa, synthetic construct
  REGION 1..20: note = Synthetic Construct
PTSGVFGRTYAPTATSSYDS

SEQ ID NO: 135 - protein, 12 aa, synthetic construct
  REGION 1..12: note = Synthetic Construct
RAGTYLSGLKNY

SEQ ID NO: 136 - protein, 18 aa, synthetic construct
  REGION 1..18: note = Synthetic Construct
RIFSLNYALIGRDTNINY

SEQ ID NO: 137 - protein, 12 aa, synthetic construct
  REGION 1..12: note = Synthetic Construct
RQDCSYNGCDEY

SEQ ID NO: 138 - protein, 16 aa, synthetic construct
  REGION 1..16: note = Synthetic Construct
RQESYNTIFLTRSYDS

SEQ ID NO: 139 - protein, 12 aa, synthetic construct
  REGION 1..12: note = Synthetic Construct
RQRCSYNGCDEY

SEQ ID NO: 140 - protein, 17 aa, synthetic construct
  REGION 1..17: note = Synthetic Construct
RRDSSWGYSRDLFEYDD

SEQ ID NO: 141 - protein, 17 aa, synthetic construct
  REGION 1..17: note = Synthetic Construct
RRDSSWGYSRDSFEYDY

SEQ ID NO: 142 - protein, 14 aa, synthetic construct
  REGION 1..14: note = Synthetic Construct
RRSCHLPFNPTHDW

SEQ ID NO: 143 - protein, 15 aa, synthetic construct
  REGION 1..15: note = Synthetic Construct
RSGTITNQDQYDFHY

SEQ ID NO: 144 - protein, 10 aa, synthetic construct
  REGION 1..10: note = Synthetic Construct
RSTFSGSYDY

SEQ ID NO: 145 - protein, 13 aa, synthetic construct
  REGION 1..13: note = Synthetic Construct
RSTPAVGSDQFLY

SEQ ID NO: 146 - protein, 18 aa, synthetic construct
  REGION 1..18: note = Synthetic Construct
RSVIQDTVVISNPIHFEY

SEQ ID NO: 147 - protein, 18 aa, synthetic construct
  REGION 1..18: note = Synthetic Construct
RSVIQYSIVPGNDFHYEY

SEQ ID NO: 148 - protein, 18 aa, synthetic construct
  REGION 1..18: note = Synthetic Construct
RSVVQLEVVLNNPIHFEY

SEQ ID NO: 149 - protein, 9 aa, synthetic construct
  REGION 1..9: note = Synthetic Construct
RTAAGVYDY

SEQ ID NO: 150 - protein, 14 aa, synthetic construct
  REGION 1..14: note = Synthetic Construct
RTDWGTTCLGRFEY

SEQ ID NO: 151 - protein, 12 aa, synthetic construct
  REGION 1..12: note = Synthetic Construct
RVLEGGTQIRDY

SEQ ID NO: 152 - protein, 11 aa, synthetic construct
  REGION 1..11: note = Synthetic Construct
RVLEGTEYRDY

SEQ ID NO: 153 - protein, 15 aa, synthetic construct
  REGION 1..15: note = Synthetic Construct
SDGIIDGTSGNSYRY

SEQ ID NO: 154 - protein, 15 aa, synthetic construct
  REGION 1..15: note = Synthetic Construct
SDGVIDGTNANAYRY

SEQ ID NO: 155 - protein, 15 aa, synthetic construct
  REGION 1..15: note = Synthetic Construct
SDGVIDGTNANGYRY

SEQ ID NO: 156 - protein, 15 aa, synthetic construct
  REGION 1..15: note = Synthetic Construct
SDGVIDGTSAVSYRY

SEQ ID NO: 157 - protein, 16 aa, synthetic construct
  REGION 1..16: note = Synthetic Construct
SVFSNVWSQRSRDYIS

SEQ ID NO: 158 - protein, 11 aa, synthetic construct
  REGION 1..11: note = Synthetic Construct
VLGRPYGRTWL

SEQ ID NO: 159 - protein, 10 aa, synthetic construct
  REGION 1..10: note = Synthetic Construct
VRSTLTHFTS

SEQ ID NO: 160 - protein, 19 aa, synthetic construct
  REGION 1..19: note = Synthetic Construct
VVRDYSRDYVTNMDFQYDY

SEQ ID NO: 161 - protein, 15 aa, synthetic construct
  REGION 1..15: note = Synthetic Construct
WQSGNSWSREEGYDY

SEQ ID NO: 162 - protein, 15 aa, synthetic construct
  REGION 1..15: note = Synthetic Construct
YKFRLSLICHPGQDY

SEQ ID NO: 163 - protein, 18 aa, synthetic construct
  REGION 1..18: note = Synthetic Construct
DPTILYHAISQRTQNYRH

SEQ ID NO: 164 - protein, 18 aa, synthetic construct
  REGION 1..18: note = Synthetic Construct
DPTILYHAISQRTQNYRY

SEQ ID NO: 165 - protein, 18 aa, synthetic construct
  REGION 1..18: note = Synthetic Construct
DQAPLRFSYSLSRDEYDY

SEQ ID NO: 166 - protein, 18 aa, synthetic construct
  REGION 1..18: note = Synthetic Construct
DRAPYRFGVSQRTQRYDY

SEQ ID NO: 167 - protein, 19 aa, synthetic construct
  REGION 1..19: note = Synthetic Construct
DRSIFQSYYSAKYPNNYEY

SEQ ID NO: 168 - protein, 18 aa, synthetic construct
  REGION 1..18: note = Synthetic Construct
DRTILYHAISQRTQNYQY

SEQ ID NO: 169 - protein, 18 aa, synthetic construct
  REGION 1..18: note = Synthetic Construct
DRTILYHGLSQRTQDYRY

SEQ ID NO: 170 - protein, 18 aa, synthetic construct
  REGION 1..18: note = Synthetic Construct
DRTTLYHAISQRTQNYQY

SEQ ID NO: 171 - protein, 16 aa, synthetic construct
  REGION 1..16: note = Synthetic Construct
DSTTDRLHSAESDYPY

SEQ ID NO: 172 - protein, 16 aa, synthetic construct
  REGION 1..16: note = Synthetic Construct
DSTTYRLHSAGSDYLY

SEQ ID NO: 173 - protein, 20 aa, synthetic construct
  REGION 1..20: note = Synthetic Construct
DTAGRTQYGSSWSTLDDYVY

SEQ ID NO: 174 - protein, 19 aa, synthetic construct
  REGION 1..19: note = Synthetic Construct
DTAPKYALHASDQPRDYDY

SEQ ID NO: 175 - protein, 19 aa, synthetic construct
  REGION 1..19: note = Synthetic Construct
DTAPKYALHASDQPRDYDY

SEQ ID NO: 176 - protein, 11 aa, synthetic construct
  REGION 1..11: note = Synthetic Construct
DTYSNYEKDYS

SEQ ID NO: 177 - protein, 11 aa, synthetic construct
  REGION 1..11: note = Synthetic Construct
DTYSNYEKDYS

SEQ ID NO: 178 - protein, 11 aa, synthetic construct
  REGION 1..11: note = Synthetic Construct
ETYSNYEKDYS

SEQ ID NO: 179 - protein, 9 aa, synthetic construct
  REGION 1..9: note = Synthetic Construct
GFVRPVFDN

SEQ ID NO: 180 - protein, 18 aa, synthetic construct
  REGION 1..18: note = Synthetic Construct
GGNHYSPNKYYTADEYDY

SEQ ID NO: 181 - protein, 18 aa, synthetic construct
  REGION 1..18: note = Synthetic Construct
GGNHYSRSKYYIADEYDY

SEQ ID NO: 182 - protein, 18 aa, synthetic construct
  REGION 1..18: note = Synthetic Construct
GGNHYSRSKYYTADEYDY

SEQ ID NO: 183 - protein, 13 aa, synthetic construct
  REGION 1..13: note = Synthetic Construct
GGWGISQPIEVDY

SEQ ID NO: 184 - protein, 13 aa, synthetic construct
  REGION 1..13: note = Synthetic Construct
GGWGITQPISVDY

SEQ ID NO: 185 - protein, 15 aa, synthetic construct
  REGION 1..15: note = Synthetic Construct
GIGHDYYTDENGYHY

SEQ ID NO: 186 - protein, 13 aa, synthetic construct
  REGION 1..13: note = Synthetic Construct
GPRLGATPGAYDY

SEQ ID NO: 187 - protein, 15 aa, synthetic construct
  REGION 1..15: note = Synthetic Construct
GRGFNIGKNPLGYGN

SEQ ID NO: 188 - protein, 12 aa, synthetic construct
  REGION 1..12: note = Synthetic Construct
GSLRVGSFSADY

SEQ ID NO: 189 - protein, 12 aa, synthetic construct
  REGION 1..12: note = Synthetic Construct
GSLRVGSFSAEY

SEQ ID NO: 190 - protein, 12 aa, synthetic construct
  REGION 1..12: note = Synthetic Construct
GSLRVGSFSGEY

SEQ ID NO: 191 - protein, 12 aa, synthetic construct
  REGION 1..12: note = Synthetic Construct
GSLRVGSFSPEY

SEQ ID NO: 192 - protein, 12 aa, synthetic construct
  REGION 1..12: note = Synthetic Construct
GSLRVGSFSVEY

SEQ ID NO: 193 - protein, 13 aa, synthetic construct
  REGION 1..13: note = Synthetic Construct
GTYGSTSVRDFGP

SEQ ID NO: 194 - protein, 11 aa, synthetic construct
  REGION 1..11: note = Synthetic Construct
GYLYGTSPHAP

SEQ ID NO: 195 - protein, 5 aa, synthetic construct
  REGION 1..5: note = Synthetic Construct
IPQRP

SEQ ID NO: 196 - protein, 11 aa, synthetic construct
  REGION 1..11: note = Synthetic Construct
KSDAHYTPIHD

SEQ ID NO: 197 - protein, 12 aa, synthetic construct
  REGION 1..12: note = Synthetic Construct
KSGTYLSGLSDL

SEQ ID NO: 198 - protein, 17 aa, synthetic construct
  REGION 1..17: note = Synthetic Construct
NRAGYGSDYWGQGTQVT

SEQ ID NO: 199 - protein, 16 aa, synthetic construct
  REGION 1..16: note = Synthetic Construct
PFTTMWPGALAKNYDY

SEQ ID NO: 200 - protein, 8 aa, synthetic construct
  REGION 1..8: note = Synthetic Construct
QDLVRGDY

SEQ ID NO: 201 - protein, 17 aa, synthetic construct
  REGION 1..17: note = Synthetic Construct
QGPYSSYLPIRVNEYGY

SEQ ID NO: 202 - protein, 8 aa, synthetic construct
  REGION 1..8: note = Synthetic Construct
QGQGNREY

SEQ ID NO: 203 - protein, 15 aa, synthetic construct
  REGION 1..15: note = Synthetic Construct
CKFLLSVLCHPGQDY

SEQ ID NO: 204 - protein, 15 aa, synthetic construct
  REGION 1..15: note = Synthetic Construct
DLTVLLTANPAHYNY

SEQ ID NO: 205 - protein, 18 aa, synthetic construct
  REGION 1..18: note = Synthetic Construct
DQAPLRFSYSLSRDKYDY

SEQ ID NO: 206 - protein, 11 aa, synthetic construct
  REGION 1..11: note = Synthetic Construct
DRNFACEYSNY

SEQ ID NO: 207 - protein, 19 aa, synthetic construct
  REGION 1..19: note = Synthetic Construct
DTAPKYALHATDQSRDYDY

SEQ ID NO: 208 - protein, 13 aa, synthetic construct
  REGION 1..13: note = Synthetic Construct
GDPYGVGLREYEW

SEQ ID NO: 209 - protein, 15 aa, synthetic construct
  REGION 1..15: note = Synthetic Construct
GLTVLLTANPAHYNY

SEQ ID NO: 210 - protein, 11 aa, synthetic construct
  REGION 1..11: note = Synthetic Construct
KSDAHYTPIHD

SEQ ID NO: 211 - protein, 15 aa, synthetic construct
  REGION 1..15: note = Synthetic Construct
NIGDYMRDPYTGYDT

SEQ ID NO: 212 - protein, 21 aa, synthetic construct
  REGION 1..21: note = Synthetic Construct
REGPGASWYCSRNGYLTQPDS

SEQ ID NO: 213 - protein, 16 aa, synthetic construct
  REGION 1..16: note = Synthetic Construct
RGFYGGTYRFPSDYDL

SEQ ID NO: 214 - protein, 18 aa, synthetic construct
  REGION 1..18: note = Synthetic Construct
RSVIQDTVVPGNPFHYEY

SEQ ID NO: 215 - protein, 15 aa, synthetic construct
  REGION 1..15: note = Synthetic Construct
SAGGIIGTSTSWYDY

SEQ ID NO: 216 - protein, 15 aa, synthetic construct
  REGION 1..15: note = Synthetic Construct
SIGDYMRDPYTGSDY

SEQ ID NO: 217 - protein, 13 aa, synthetic construct
  REGION 1..13: note = Synthetic Construct
TSRGWSIGMTYDY

SEQ ID NO: 218 - protein, 14 aa, synthetic construct
  REGION 1..14: note = Synthetic Construct
QRSCHLPFDPTHDW

SEQ ID NO: 219 - protein, 16 aa, synthetic construct
  REGION 1..16: note = Synthetic Construct
QRSDSSSWGYEDDYDY

SEQ ID NO: 220 - protein, 15 aa, synthetic construct
  REGION 1..15: note = Synthetic Construct
RASSTTYDDPRSFAF

SEQ ID NO: 221 - protein, 17 aa, synthetic construct
  REGION 1..17: note = Synthetic Construct
RIGSIANLQYREYEFAY

SEQ ID NO: 222 - protein, 14 aa, synthetic construct
  REGION 1..14: note = Synthetic Construct
RKDSVVLSSVGYDY

SEQ ID NO: 223 - protein, 15 aa, synthetic construct
  REGION 1..15: note = Synthetic Construct
RLFPGIATSSIDYSS

SEQ ID NO: 224 - protein, 12 aa, synthetic construct
  REGION 1..12: note = Synthetic Construct
RQGCSYNGCDEY

SEQ ID NO: 225 - protein, 12 aa, synthetic construct
  REGION 1..12: note = Synthetic Construct
RQGCSYNGCDKY

SEQ ID NO: 226 - protein, 15 aa, synthetic construct
  REGION 1..15: note = Synthetic Construct
RQSGGVVTNLDEWDY

SEQ ID NO: 227 - protein, 15 aa, synthetic construct
  REGION 1..15: note = Synthetic Construct
RQSGGVVTNTDEWDY

SEQ ID NO: 228 - protein, 10 aa, synthetic construct
  REGION 1..10: note = Synthetic Construct
RRAYRGEYDY

SEQ ID NO: 229 - protein, 17 aa, synthetic construct
  REGION 1..17: note = Synthetic Construct
RRDSSFGYSRDSFEYDD

SEQ ID NO: 230 - protein, 17 aa, synthetic construct
  REGION 1..17: note = Synthetic Construct
RRDSSWGYSRDLFEYDD

SEQ ID NO: 231 - protein, 17 aa, synthetic construct
  REGION 1..17: note = Synthetic Construct
RRDSSWGYSRDSFEYDD

SEQ ID NO: 232 - protein, 15 aa, synthetic construct
  REGION 1..15: note = Synthetic Construct
RRSGGELVNRDYWDY

SEQ ID NO: 233 - protein, 15 aa, synthetic construct
  REGION 1..15: note = Synthetic Construct
RRSGGVVTNTDEWDY

SEQ ID NO: 234 - protein, 16 aa, synthetic construct
  REGION 1..16: note = Synthetic Construct
RSEIIIASPTGGEYDY

SEQ ID NO: 235 - protein, 18 aa, synthetic construct
  REGION 1..18: note = Synthetic Construct
RSVTQLDIVLDNPIHYEY

SEQ ID NO: 236 - protein, 18 aa, synthetic construct
  REGION 1..18: note = Synthetic Construct
RSVVQLHIVLNNPIHYEY

SEQ ID NO: 237 - protein, 15 aa, synthetic construct
  REGION 1..15: note = Synthetic Construct
SHGVIDGTSANDYRY

SEQ ID NO: 238 - protein, 15 aa, synthetic construct
  REGION 1..15: note = Synthetic Construct
SHGVVDGTSVNGYRY

SEQ ID NO: 239 - protein, 17 aa, synthetic construct
  REGION 1..17: note = Synthetic Construct
SKDPYGSPWTRSEFDDY

SEQ ID NO: 240 - protein, 17 aa, synthetic construct
  REGION 1..17: note = Synthetic Construct
SKDRFGSPWTRSEFDDY

SEQ ID NO: 241 - protein, 15 aa, synthetic construct
  REGION 1..15: note = Synthetic Construct
SRTAGLTSNRSLYDY

SEQ ID NO: 242 - protein, 18 aa, synthetic construct
  REGION 1..18: note = Synthetic Construct
STDVLVLTGIEEARLYDT

SEQ ID NO: 243 - protein, 17 aa, synthetic construct
  REGION 1..17: note = Synthetic Construct
SYYSGSQRFPRLNDYDF

SEQ ID NO: 244 - protein, 16 aa, synthetic construct
  REGION 1..16: note = Synthetic Construct
VLGRPYGRTWLDDIDV

SEQ ID NO: 245 - protein, 16 aa, synthetic construct
  REGION 1..16: note = Synthetic Construct
VLGRPYGSHWLSDMDA

SEQ ID NO: 246 - protein, 15 aa, synthetic construct
  REGION 1..15: note = Synthetic Construct
VNQVIGSRLVSGYDY

SEQ ID NO: 247 - protein, 16 aa, synthetic construct
  REGION 1..16: note = Synthetic Construct
VLGRPYGSTWLDDIDA

SEQ ID NO: 248 - protein, 8 aa, synthetic construct
  REGION 1..8: note = Synthetic Construct
RTPYMRDY

SEQ ID NO: 249 - protein, 18 aa, synthetic construct
  REGION 1..18: note = Synthetic Construct
SRPSYGSPLQRQPSGYDY

SEQ ID NO: 250 - protein, 15 aa, synthetic construct
  REGION 1..15: note = Synthetic Construct
VPGAAVVTTASLYHT

SEQ ID NO: 251 - protein, 12 aa, synthetic construct
  REGION 1..12: note = Synthetic Construct
WRSLSNVNAGDY

SEQ ID NO: 252 - protein, 11 aa, synthetic construct
  REGION 1..11: note = Synthetic Construct
AQPDVFGGGDY

SEQ ID NO: 253 - protein, 13 aa, synthetic construct
  REGION 1..13: note = Synthetic Construct
RFGIVTTRDEYEF

SEQ ID NO: 254 - protein, 14 aa, synthetic construct
  REGION 1..14: note = Synthetic Construct
VGPRFNPRGSPTNY

SEQ ID NO: 255 - protein, 12 aa, synthetic construct
  REGION 1..12: note = Synthetic Construct
NTLNSQLLPRAY

SEQ ID NO: 256 - protein, 7 aa, synthetic construct
  REGION 1..7: note = Synthetic Construct
PRTKSSG

SEQ ID NO: 257 - protein, 16 aa, synthetic construct
  REGION 1..16: note = Synthetic Construct
VLGRPYGSSWLDDMDA

SEQ ID NO: 258 - protein, 11 aa, synthetic construct
  REGION 1..11: note = Synthetic Construct
VLGRPYGSRWL

SEQ ID NO: 259 - protein, 18 aa, synthetic construct
  REGION 1..18: note = Synthetic Construct
SRPSYGLPLQRQSSGYDY

SEQ ID NO: 260 - protein, 14 aa, synthetic construct
  REGION 1..14: note = Synthetic Construct
RWGGSTYFAKDYEH

SEQ ID NO: 261 - protein, 10 aa, synthetic construct
  REGION 1..10: note = Synthetic Construct
RSLESGEYDN

SEQ ID NO: 262 - protein, 15 aa, synthetic construct
  REGION 1..15: note = Synthetic Construct
RMGNVLMTRPSDYGY

SEQ ID NO: 263 - protein, 15 aa, synthetic construct
  REGION 1..15: note = Synthetic Construct
ANWFGRSDDAGQYTY

SEQ ID NO: 264 - protein, 15 aa, synthetic construct
  REGION 1..15: note = Synthetic Construct
RRSGGELTNTDYWDY

SEQ ID NO: 265 - protein, 15 aa, synthetic construct
  REGION 1..15: note = Synthetic Construct
RLFPGIATTAIDYSS

SEQ ID NO: 266 - protein, 9 aa, synthetic construct
  REGION 1..9: note = Synthetic Construct
YDLRDRLQW

SEQ ID NO: 267 - protein, 15 aa, synthetic construct
  REGION 1..15: note = Synthetic Construct
RLFPGIATSSLDYAS

SEQ ID NO: 268 - protein, 17 aa, synthetic construct
  REGION 1..17: note = Synthetic Construct
NSRFSAYEISNRLRYDY

SEQ ID NO: 269 - protein, 10 aa, synthetic construct
  REGION 1..10: note = Synthetic Construct
RDIETAEYIY

SEQ ID NO: 270 - protein, 18 aa, synthetic construct
  REGION 1..18: note = Synthetic Construct
SRPSYGLPLQRQPSGYDY

SEQ ID NO: 271 - protein, 7 aa, synthetic construct
  REGION 1..7: note = Synthetic Construct
TTNDYDY

SEQ ID NO: 272 - protein, 11 aa, synthetic construct
  REGION 1..11: note = Synthetic Construct
ETYSLYEKEYS

SEQ ID NO: 273 - protein, 15 aa, synthetic construct
  REGION 1..15: note = Synthetic Construct
ANWFGRSDDAGQYSY

SEQ ID NO: 274 - protein, 18 aa, synthetic construct
  REGION 1..18: note = Synthetic Construct
DIAPFYCSWPLRTRLVEY

SEQ ID NO: 275 - protein, 13 aa, synthetic construct
  REGION 1..13: note = Synthetic Construct
VGQEGSAYAPRAY

SEQ ID NO: 276 - protein, 18 aa, synthetic construct
  REGION 1..18: note = Synthetic Construct
EEWGSGTLRPTSTSWYHY

SEQ ID NO: 277 - protein, 10 aa, synthetic construct
  REGION 1..10: note = Synthetic Construct
RTPETGQYDY

SEQ ID NO: 278 - protein, 14 aa, synthetic construct
  REGION 1..14: note = Synthetic Construct
DRTAYYTNSRYYDY

SEQ ID NO: 279 - protein, 15 aa, synthetic construct
  REGION 1..15: note = Synthetic Construct
RLFPGIATSSLDYSS

SEQ ID NO: 280 - protein, 20 aa, synthetic construct
  REGION 1..20: note = Synthetic Construct
FAGRSQYYCSDYGSLREYDY

SEQ ID NO: 281 - protein, 15 aa, synthetic construct
  REGION 1..15: note = Synthetic Construct
RRSGGELVNKDYWDY

SEQ ID NO: 282 - protein, 18 aa, synthetic construct
  REGION 1..18: note = Synthetic Construct
GGNHYSPSKYYTADEYDY

SEQ ID NO: 283 - protein, 13 aa, synthetic construct
  REGION 1..13: note = Synthetic Construct
TAYSTTYNSVRDY

SEQ ID NO: 284 - protein, 13 aa, synthetic construct
  REGION 1..13: note = Synthetic Construct
VGQDASAYAPRAY

SEQ ID NO: 285 - protein, 10 aa, synthetic construct
  REGION 1..10: note = Synthetic Construct
RDIETAEYTY

SEQ ID NO: 286 - protein, 14 aa, synthetic construct
  REGION 1..14: note = Synthetic Construct
VGPRINPRGSPTNY

SEQ ID NO: 287 - protein, 14 aa, synthetic construct
  REGION 1..14: note = Synthetic Construct
ARFYGRSIAQDYDS

SEQ ID NO: 288 - protein, 15 aa, synthetic construct
  REGION 1..15: note = Synthetic Construct
VPGAAVVTTASIYHT

SEQ ID NO: 289 - protein, 18 aa, synthetic construct
  REGION 1..18: note = Synthetic Construct
SSRTMIAPSQAMPINWDY

SEQ ID NO: 290 - protein, 15 aa, synthetic construct
  REGION 1..15: note = Synthetic Construct
RLFPGIATTSIDYSS

SEQ ID NO: 291 - protein, 7 aa, synthetic construct
  REGION 1..7: note = Synthetic Construct
RGYGMDY

SEQ ID NO: 292 - protein, 16 aa, synthetic construct
  REGION 1..16: note = Synthetic Construct
DSTIDRLHSAGSDYRY

SEQ ID NO: 293 - protein, 13 aa, synthetic construct
  REGION 1..13: note = Synthetic Construct
VAYDYSWGRPRNF

SEQ ID NO: 294 - protein, 16 aa, synthetic construct
  REGION 1..16: note = Synthetic Construct
RQAVGPGIMSALTYDY

SEQ ID NO: 295 - protein, 12 aa, synthetic construct
  REGION 1..12: note = Synthetic Construct
QDFASPVGPRDY

SEQ ID NO: 296 - protein, 16 aa, synthetic construct
  REGION 1..16: note = Synthetic Construct
KYGYLQPMGRNTVIDY

SEQ ID NO: 297 - protein, 18 aa, synthetic construct
  REGION 1..18: note = Synthetic Construct
GGNHYSRSRYYTADEYDY

SEQ ID NO: 298 - protein, 21 aa, synthetic construct
  REGION 1..21: note = Synthetic Construct
DLIEYYRSTYYYSTQPSSYDY

SEQ ID NO: 299 - protein, 16 aa, synthetic construct
  REGION 1..16: note = Synthetic Construct
VLGRPYGSRWLDDVDS

SEQ ID NO: 300 - protein, 19 aa, synthetic construct
  REGION 1..19: note = Synthetic Construct
VSKVFARDYADWWSGLFSF

SEQ ID NO: 301 - protein, 13 aa, synthetic construct
  REGION 1..13: note = Synthetic Construct
ALYVTSTRGSYAY

SEQ ID NO: 302 - protein, 15 aa, synthetic construct
  REGION 1..15: note = Synthetic Construct
PYTTQWATESRDYDY

SEQ ID NO: 303 - protein, 17 aa, synthetic construct
  REGION 1..17: note = Synthetic Construct
DLLPGTYLYTAQNAYAY

SEQ ID NO: 304 - protein, 16 aa, synthetic construct
  REGION 1..16: note = Synthetic Construct
DRGYSLYYYSSREYVY

SEQ ID NO: 305 - protein, 16 aa, synthetic construct
  REGION 1..16: note = Synthetic Construct
DSNTYRLHSAGTEYRY

SEQ ID NO: 306 - protein, 16 aa, synthetic construct
  REGION 1..16: note = Synthetic Construct
VLGRPYGSRWLDDVGS

SEQ ID NO: 307 - protein, 15 aa, synthetic construct
  REGION 1..15: note = Synthetic Construct
RRSGGELTNRDYWDY

SEQ ID NO: 308 - protein, 18 aa, synthetic construct
  REGION 1..18: note = Synthetic Construct
SRPSYGLPLQRHPSGYDY

SEQ ID NO: 309 - protein, 17 aa, synthetic construct
  REGION 1..17: note = Synthetic Construct
DRLSFCGSAWYAPVQTY

SEQ ID NO: 310 - protein, 16 aa, synthetic construct
  REGION 1..16: note = Synthetic Construct
DSTTDRLHSAGSDYRY

SEQ ID NO: 311 - protein, 7 aa, synthetic construct
  REGION 1..7: note = Synthetic Construct
VDNHMDY

SEQ ID NO: 312 - protein, 11 aa, synthetic construct
  REGION 1..11: note = Synthetic Construct
ETYSNYEKDDS

SEQ ID NO: 313 - protein, 13 aa, synthetic construct
  REGION 1..13: note = Synthetic Construct
VGQEASAYAPRAY

SEQ ID NO: 314 - protein, 15 aa, synthetic construct
  REGION 1..15: note = Synthetic Construct
AGGVLLTTTPRRYDY

SEQ ID NO: 315 - protein, 16 aa, synthetic construct
  REGION 1..16: note = Synthetic Construct
VLGRPYGRTWLDDIDA

SEQ ID NO: 316 - protein, 10 aa, synthetic construct
  REGION 1..10: note = Synthetic Construct
RSATTALYDY

SEQ ID NO: 317 - protein, 18 aa, synthetic construct
  REGION 1..18: note = Synthetic Construct
DATRTYSSLSQRTDDYDY

SEQ ID NO: 318 - protein, 18 aa, synthetic construct
  REGION 1..18: note = Synthetic Construct
AGPGKPLRNYYTDYDTDS

SEQ ID NO: 319 - protein, 11 aa, synthetic construct
  REGION 1..11: note = Synthetic Construct
ETYSLYEKDYS

SEQ ID NO: 320 - protein, 7 aa, synthetic construct
  REGION 1..7: note = Synthetic Construct
VDNQMDY

SEQ ID NO: 321 - protein, 15 aa, synthetic construct
  REGION 1..15: note = Synthetic Construct
SHGVIDGTNANDYRY

SEQ ID NO: 322 - protein, 18 aa, synthetic construct
  REGION 1..18: note = Synthetic Construct
GVFHVDGGYYSTRDSYAY

SEQ ID NO: 323 - protein, 21 aa, synthetic construct
  REGION 1..21: note = Synthetic Construct
ALGSDSQRTVIAGCPIRYFGS

SEQ ID NO: 324 - protein, 15 aa, synthetic construct
  REGION 1..15: note = Synthetic Construct
RLFPGIATSSLDYTS

SEQ ID NO: 325 - protein, 18 aa, synthetic construct
  REGION 1..18: note = Synthetic Construct
DLSALWHGVPTTARQYDS

SEQ ID NO: 326 - protein, 15 aa, synthetic construct
  REGION 1..15: note = Synthetic Construct
RASSSTWDDPRSFAF

SEQ ID NO: 327 - protein, 15 aa, synthetic construct
  REGION 1..15: note = Synthetic Construct
RRSGGELTNSDYWDY

SEQ ID NO: 328 - protein, 10 aa, synthetic construct
  REGION 1..10: note = Synthetic Construct
RDPTSSNYDY

SEQ ID NO: 329 - protein, 15 aa, synthetic construct
  REGION 1..15: note = Synthetic Construct
RRGVTVTSSSSSFEY

SEQ ID NO: 330 - protein, 19 aa, synthetic construct
  REGION 1..19: note = Synthetic Construct
VSFGCPDGKEVVIAERTVY

SEQ ID NO: 331 - protein, 18 aa, synthetic construct
  REGION 1..18: note = Synthetic Construct
DAVSSIYMYTMVENRYDY

SEQ ID NO: 332 - protein, 18 aa, synthetic construct
  REGION 1..18: note = Synthetic Construct
DLSGLWHGIPTTARQYDY

SEQ ID NO: 333 - protein, 15 aa, synthetic construct
  REGION 1..15: note = Synthetic Construct
WRSGTSWSREEGYDY

SEQ ID NO: 334 - protein, 15 aa, synthetic construct
  REGION 1..15: note = Synthetic Construct
DKWAVAHSDWSGYEY

SEQ ID NO: 335 - protein, 16 aa, synthetic construct
  REGION 1..16: note = Synthetic Construct
DSTTDRLHSAGTEYHY

SEQ ID NO: 336 - protein, 18 aa, synthetic construct
  REGION 1..18: note = Synthetic Construct
DQSPLHFGVPRSRGQYDY

SEQ ID NO: 337 - protein, 11 aa, synthetic construct
  REGION 1..11: note = Synthetic Construct
DTYSNYKKDDS

SEQ ID NO: 338 - protein, 11 aa, synthetic construct
  REGION 1..11: note = Synthetic Construct
ETYTLYEKDSS

SEQ ID NO: 339 - protein, 17 aa, synthetic construct
  REGION 1..17: note = Synthetic Construct
DLLPGTYLHTAQNAYGY

SEQ ID NO: 340 - protein, 13 aa, synthetic construct
  REGION 1..13: note = Synthetic Construct
PFSMAVAGTGGPY

SEQ ID NO: 341 - protein, 18 aa, synthetic construct
  REGION 1..18: note = Synthetic Construct
EEWGSGTIRPTSTSWYHY

SEQ ID NO: 342 - protein, 20 aa, synthetic construct
  REGION 1..20: note = Synthetic Construct
VTMGVYGINYYPTSARQYDT

SEQ ID NO: 343 - protein, 15 aa, synthetic construct
  REGION 1..15: note = Synthetic Construct
CKFRLSVLCHPGQDY

SEQ ID NO: 344 - protein, 9 aa, synthetic construct
  REGION 1..9: note = Synthetic Construct
RTERGVYDY

SEQ ID NO: 345 - protein, 15 aa, synthetic construct
  REGION 1..15: note = Synthetic Construct
RSAGNIDSRPGQYDD

SEQ ID NO: 346 - protein, 9 aa, synthetic construct
  REGION 1..9: note = Synthetic Construct
TGAFMKNDY

SEQ ID NO: 347 - protein, 11 aa, synthetic construct
  REGION 1..11: note = Synthetic Construct
DRLGSDPEYRY

SEQ ID NO: 348 - protein, 14 aa, synthetic construct
  REGION 1..14: note = Synthetic Construct
DPTAQNMGIRNPPY

SEQ ID NO: 349 - protein, 15 aa, synthetic construct
  REGION 1..15: note = Synthetic Construct
WRAGTSWSREEGYDY

SEQ ID NO: 350 - protein, 8 aa, synthetic construct
  REGION 1..8: note = Synthetic Construct
EPIIGSAY

SEQ ID NO: 351 - protein, 15 aa, synthetic construct
  REGION 1..15: note = Synthetic Construct
DKWAVAHSDWARYDY

SEQ ID NO: 352 - protein, 16 aa, synthetic construct
  REGION 1..16: note = Synthetic Construct
PFTTMWPGALAKYYDY

SEQ ID NO: 353 - protein, 10 aa, synthetic construct
  REGION 1..10: note = Synthetic Construct
KIFGPGSGSY

SEQ ID NO: 354 - protein, 15 aa, synthetic construct
  REGION 1..15: note = Synthetic Construct
GAPGYYSASYLDYKY

SEQ ID NO: 355 - protein, 7 aa, synthetic construct
  REGION 1..7: note = Synthetic Construct
VDDQMDY

SEQ ID NO: 356 - protein, 14 aa, synthetic construct
  REGION 1..14: note = Synthetic Construct
DPRYDYYIASSYNY

SEQ ID NO: 357 - protein, 20 aa, synthetic construct
  REGION 1..20: note = Synthetic Construct
AHARVYGANWSSSNPYDYDG

SEQ ID NO: 358 - protein, 10 aa, synthetic construct
  REGION 1..10: note = Synthetic Construct
RDPETAEYTN

SEQ ID NO: 359 - protein, 20 aa, synthetic construct
  REGION 1..20: note = Synthetic Construct
AHGRVYGSMWYSSNRYDYSS

SEQ ID NO: 360 - protein, 9 aa, synthetic construct
  REGION 1..9: note = Synthetic Construct
SPPGRDWDY

SEQ ID NO: 361 - protein, 18 aa, synthetic construct
  REGION 1..18: note = Synthetic Construct
DLSALWHGIPTTARLFDS

SEQ ID NO: 362 - protein, 16 aa, synthetic construct
  REGION 1..16: note = Synthetic Construct
QRSVHSRLYETALYDY

SEQ ID NO: 363 - protein, 10 aa, synthetic construct
  REGION 1..10: note = Synthetic Construct
RNIETAEYTY

SEQ ID NO: 364 - protein, 15 aa, synthetic construct
  REGION 1..15: note = Synthetic Construct
RRSGGELTNTDHWDY

SEQ ID NO: 365 - protein, 11 aa, synthetic construct
  REGION 1..11: note = Synthetic Construct
RGTATSGEYDY

SEQ ID NO: 366 - protein, 15 aa, synthetic construct
  REGION 1..15: note = Synthetic Construct
SDGVIDGTSANDYRY

SEQ ID NO: 367 - protein, 13 aa, synthetic construct
  REGION 1..13: note = Synthetic Construct
VGQEGSARAPRAY

SEQ ID NO: 368 - protein, 15 aa, synthetic construct
  REGION 1..15: note = Synthetic Construct
APTSPYATSTRDYTY

SEQ ID NO: 369 - protein, 16 aa, synthetic construct
  REGION 1..16: note = Synthetic Construct
QGSYSYIRVRPGDYDY

SEQ ID NO: 370 - protein, 18 aa, synthetic construct
  REGION 1..18: note = Synthetic Construct
TLREYYSGRSTDARAYDY

SEQ ID NO: 371 - protein, 13 aa, synthetic construct
  REGION 1..13: note = Synthetic Construct
VGQEGSSYAPRAY

SEQ ID NO: 372 - protein, 19 aa, synthetic construct
  REGION 1..19: note = Synthetic Construct
PLKIDYAIGRCLTTMPGIT

SEQ ID NO: 373 - protein, 17 aa, synthetic construct
  REGION 1..17: note = Synthetic Construct
RRDSSWGYSRDLFEYDY

SEQ ID NO: 374 - protein, 15 aa, synthetic construct
  REGION 1..15: note = Synthetic Construct
CKFRLSLLCHPGQDY

SEQ ID NO: 375 - protein, 14 aa, synthetic construct
  REGION 1..14: note = Synthetic Construct
ETYSNYEKDDSCGY

SEQ ID NO: 376 - protein, 14 aa, synthetic construct
  REGION 1..14: note = Synthetic Construct
DGKGGGRYSYRYDY

SEQ ID NO: 377 - protein, 17 aa, synthetic construct
  REGION 1..17: note = Synthetic Construct
DKDVYYGYTSFPNEYEY

SEQ ID NO: 378 - protein, 18 aa, synthetic construct
  REGION 1..18: note = Synthetic Construct
ARPSYGSPLQRQPSGYDY

SEQ ID NO: 379 - protein, 17 aa, synthetic construct
  REGION 1..17: note = Synthetic Construct
DLDPDWYLQDFPNTYDY

SEQ ID NO: 380 - protein, 10 aa, synthetic construct
  REGION 1..10: note = Synthetic Construct
RNLETFDYTY

SEQ ID NO: 381 - protein, 14 aa, synthetic construct
  REGION 1..14: note = Synthetic Construct
ETYSNYEKDYSRGY

SEQ ID NO: 382 - protein, 17 aa, synthetic construct
  REGION 1..17: note = Synthetic Construct
SYYSGSQRFPRLIDYDF

SEQ ID NO: 383 - protein, 12 aa, synthetic construct
  REGION 1..12: note = Synthetic Construct
HAGNTLYRSGPY

SEQ ID NO: 384 - protein, 16 aa, synthetic construct
  REGION 1..16: note = Synthetic Construct
VLGRPYGSSWLDDMDY

SEQ ID NO: 385 - protein, 16 aa, synthetic construct
  REGION 1..16: note = Synthetic Construct
DSTTDRLHSAGSDYHY

SEQ ID NO: 386 - protein, 16 aa, synthetic construct
  REGION 1..16: note = Synthetic Construct
DSNIDRLHSAGSDYRY

SEQ ID NO: 387 - protein, 15 aa, synthetic construct
  REGION 1..15: note = Synthetic Construct
RGGPLITTSRLHYDF

SEQ ID NO: 388 - protein, 12 aa, synthetic construct
  REGION 1..12: note = Synthetic Construct
GIYGSYWKDYPY

SEQ ID NO: 389 - protein, 11 aa, synthetic construct
  REGION 1..11: note = Synthetic Construct
SRPSYGSPLQR

SEQ ID NO: 390 - protein, 8 aa, synthetic construct
  REGION 1..8: note = Synthetic Construct
APIIGSTY

SEQ ID NO: 391 - protein, 16 aa, synthetic construct
  REGION 1..16: note = Synthetic Construct
KQRVGPGIMSALTYDY

SEQ ID NO: 392 - protein, 18 aa, synthetic construct
  REGION 1..18: note = Synthetic Construct
SSRTMNTISQTMRINWDY

SEQ ID NO: 393 - protein, 15 aa, synthetic construct
  REGION 1..15: note = Synthetic Construct
SRTAGLTSNPSLYDY

SEQ ID NO: 394 - protein, 15 aa, synthetic construct
  REGION 1..15: note = Synthetic Construct
APTSPYATSTRDYAY

SEQ ID NO: 395 - protein, 8 aa, synthetic construct
  REGION 1..8: note = Synthetic Construct
RTPYMRDL

SEQ ID NO: 396 - protein, 15 aa, synthetic construct
  REGION 1..15: note = Synthetic Construct
NRGPNLYPHIGDIEY

SEQ ID NO: 397 - protein, 7 aa, synthetic construct
  REGION 1..7: note = Synthetic Construct
RTGSGVY

SEQ ID NO: 398 - protein, 19 aa, synthetic construct
  REGION 1..19: note = Synthetic Construct
AEASGITTVIENIASGYTY

SEQ ID NO: 399 - protein, 16 aa, synthetic construct
  REGION 1..16: note = Synthetic Construct
VLGRPYGSHWLDDMDY

SEQ ID NO: 400 - protein, 11 aa, synthetic construct
  REGION 1..11: note = Synthetic Construct
VLGRPYRSHWL

SEQ ID NO: 401 - protein, 20 aa, synthetic construct
  REGION 1..20: note = Synthetic Construct
AHARVYGANWSSSNRYDYDY

SEQ ID NO: 402 - protein, 17 aa, synthetic construct
  REGION 1..17: note = Synthetic Construct
DLRRRCPSRTTYSDLDY

SEQ ID NO: 403 - protein, 20 aa, synthetic construct
  REGION 1..20: note = Synthetic Construct
GGAYYNTDCSHPPVEHGLNY

SEQ ID NO: 404 - protein, 13 aa, synthetic construct
  REGION 1..13: note = Synthetic Construct
RSTSAVGYNQYNY

SEQ ID NO: 405 - protein, 11 aa, synthetic construct
  REGION 1..11: note = Synthetic Construct
VLGRPYGSHWL

SEQ ID NO: 406 - protein, 15 aa, synthetic construct
  REGION 1..15: note = Synthetic Construct
RLFPGIATFSLDYSS

SEQ ID NO: 407 - protein, 13 aa, synthetic construct
  REGION 1..13: note = Synthetic Construct
TQTLATRVSAFDY

SEQ ID NO: 408 - protein, 17 aa, synthetic construct
  REGION 1..17: note = Synthetic Construct
RVGSIAGLQYREYEFAY

SEQ ID NO: 409 - protein, 14 aa, synthetic construct
  REGION 1..14: note = Synthetic Construct
TNTDYETDRRGYGD

SEQ ID NO: 410 - protein, 13 aa, synthetic construct
  REGION 1..13: note = Synthetic Construct
QMGVRPLMGDYDY

SEQ ID NO: 411 - protein, 14 aa, synthetic construct
  REGION 1..14: note = Synthetic Construct
RQGHGTTISKEYDY

SEQ ID NO: 412 - protein, 18 aa, synthetic construct
  REGION 1..18: note = Synthetic Construct
DPTILYHAISERTQNYRY

SEQ ID NO: 413 - protein, 13 aa, synthetic construct
  REGION 1..13: note = Synthetic Construct
VAPVEATGRIRAY

SEQ ID NO: 414 - protein, 18 aa, synthetic construct
  REGION 1..18: note = Synthetic Construct
PGTPYSGRLYSNDYEYNY

SEQ ID NO: 415 - protein, 11 aa, synthetic construct
  REGION 1..11: note = Synthetic Construct
PACSGSGCRNY

SEQ ID NO: 416 - protein, 11 aa, synthetic construct
  REGION 1..11: note = Synthetic Construct
DTYSNYEKDDS

SEQ ID NO: 417 - protein, 11 aa, synthetic construct
  REGION 1..11: note = Synthetic Construct
DSYSIYEKDDS

SEQ ID NO: 418 - protein, 13 aa, synthetic construct
  REGION 1..13: note = Synthetic Construct
GGWGLTQPISVDY

SEQ ID NO: 419 - protein, 21 aa, synthetic construct
  REGION 1..21: note = Synthetic Construct
GALTYYSGTYYLTCHPHAMDY

SEQ ID NO: 420 - protein, 20 aa, synthetic construct
  REGION 1..20: note = Synthetic Construct
AHGRVYGSTWYSSNRYDYSA

SEQ ID NO: 421 - protein, 16 aa, synthetic construct
  REGION 1..16: note = Synthetic Construct
VLGRPYGTRWLDDIDS

SEQ ID NO: 422 - protein, 11 aa, synthetic construct
  REGION 1..11: note = Synthetic Construct
VLGRPYGNHWL

SEQ ID NO: 423 - protein, 15 aa, synthetic construct
  REGION 1..15: note = Synthetic Construct
SCAVPGRRVVSSRDS

SEQ ID NO: 424 - protein, 15 aa, synthetic construct
  REGION 1..15: note = Synthetic Construct
RLYPGIATSSIDYSS

SEQ ID NO: 425 - protein, 12 aa, synthetic construct
  REGION 1..12: note = Synthetic Construct
GRIVASNADYDY

SEQ ID NO: 426 - protein, 19 aa, synthetic construct
  REGION 1..19: note = Synthetic Construct
AERTYSVGSIYYTEHPYDY

SEQ ID NO: 427 - protein, 16 aa, synthetic construct
  REGION 1..16: note = Synthetic Construct
KQRVGPGIMSAPTYDY

SEQ ID NO: 428 - protein, 20 aa, synthetic construct
  REGION 1..20: note = Synthetic Construct
FSGRSQYYCSGYESLRHYDY

SEQ ID NO: 429 - protein, 20 aa, synthetic construct
  REGION 1..20: note = Synthetic Construct
AHGRVYGSRWFSSDGYDYPS

SEQ ID NO: 430 - protein, 16 aa, synthetic construct
  REGION 1..16: note = Synthetic Construct
VLGRPYGRTWLDDVDV

SEQ ID NO: 431 - protein, 15 aa, synthetic construct
  REGION 1..15: note = Synthetic Construct
GIGDYMRDPYREVDY

SEQ ID NO: 432 - protein, 18 aa, synthetic construct
  REGION 1..18: note = Synthetic Construct
DLSALWHGVPTTARLYDS

SEQ ID NO: 433 - protein, 11 aa, synthetic construct
  REGION 1..11: note = Synthetic Construct
AQPDVFGGGTS

SEQ ID NO: 434 - protein, 18 aa, synthetic construct
  REGION 1..18: note = Synthetic Construct
DSRLRGAGLSTTDLEYDY

SEQ ID NO: 435 - protein, 15 aa, synthetic construct
  REGION 1..15: note = Synthetic Construct
RVFPGIATSSIDYSS

SEQ ID NO: 436 - protein, 18 aa, synthetic construct
  REGION 1..18: note = Synthetic Construct
SRPSYGSTLQRQPSGYDY

SEQ ID NO: 437 - protein, 20 aa, synthetic construct
  REGION 1..20: note = Synthetic Construct
SYGNVYGRSWIGRNIHDYDQ

SEQ ID NO: 438 - protein, 12 aa, synthetic construct
  REGION 1..12: note = Synthetic Construct
GALRVGSFSPDY

SEQ ID NO: 439 - protein, 9 aa, synthetic construct
  REGION 1..9: note = Synthetic Construct
VDVSVGGDY

SEQ ID NO: 440 - protein, 9 aa, synthetic construct
  REGION 1..9: note = Synthetic Construct
RSASGRYDW

SEQ ID NO: 441 - protein, 13 aa, synthetic construct
  REGION 1..13: note = Synthetic Construct
ALYVTSTRGSYDY

SEQ ID NO: 442 - protein, 18 aa, synthetic construct
  REGION 1..18: note = Synthetic Construct
TSRTMNTISQTMRINWEY

SEQ ID NO: 443 - protein, 17 aa, synthetic construct
  REGION 1..17: note = Synthetic Construct
ARWSYNKHYYNRDEYDF

SEQ ID NO: 444 - protein, 15 aa, synthetic construct
  REGION 1..15: note = Synthetic Construct
HPPSEISNSQASYVY

SEQ ID NO: 445 - protein, 10 aa, synthetic construct
  REGION 1..10: note = Synthetic Construct
RNPGTGQYDY

SEQ ID NO: 446 - protein, 17 aa, synthetic construct
  REGION 1..17: note = Synthetic Construct
TPHLDGSEYCVSDYFDS

SEQ ID NO: 447 - protein, 8 aa, synthetic construct
  REGION 1..8: note = Synthetic Construct
GIPMSTVL

SEQ ID NO: 448 - protein, 16 aa, synthetic construct
  REGION 1..16: note = Synthetic Construct
DRGYSLTYYSSREYAY

SEQ ID NO: 449 - protein, 8 aa, synthetic construct
  REGION 1..8: note = Synthetic Construct
LSASGLSS

SEQ ID NO: 450 - protein, 18 aa, synthetic construct
  REGION 1..18: note = Synthetic Construct
TSRTMIHTSQTMRINWDY

SEQ ID NO: 451 - protein, 11 aa, synthetic construct
  REGION 1..11: note = Synthetic Construct
ETYSNYEKEYS

SEQ ID NO: 452 - protein, 16 aa, synthetic construct
  REGION 1..16: note = Synthetic Construct
VLGRPYGSRWLEDMDA

SEQ ID NO: 453 - protein, 11 aa, synthetic construct
  REGION 1..11: note = Synthetic Construct
NAYDLRDRLQW

SEQ ID NO: 454 - protein, 14 aa, synthetic construct
  REGION 1..14: note = Synthetic Construct
VGTKVGETWMPFGS

SEQ ID NO: 455 - protein, 11 aa, synthetic construct
  REGION 1..11: note = Synthetic Construct
RVNPVPVVGPY

SEQ ID NO: 456 - protein, 13 aa, synthetic construct
  REGION 1..13: note = Synthetic Construct
RSTSAVGSNQYNY

SEQ ID NO: 457 - protein, 5 aa, synthetic construct
  REGION 1..5: note = Synthetic Construct
IGTNY

SEQ ID NO: 458 - protein, 19 aa, synthetic construct
  REGION 1..19: note = Synthetic Construct
GPRFSERGWQPRARSTYDY

SEQ ID NO: 459 - protein, 18 aa, synthetic construct
  REGION 1..18: note = Synthetic Construct
DPTILYHALSQRTQNYRY

SEQ ID NO: 460 - protein, 16 aa, synthetic construct
  REGION 1..16: note = Synthetic Construct
VLGRPYGRTWLNDIDV

SEQ ID NO: 461 - protein, 16 aa, synthetic construct
  REGION 1..16: note = Synthetic Construct
QRSDSYSLGYDDDYAY

SEQ ID NO: 462 - protein, 15 aa, synthetic construct
  REGION 1..15: note = Synthetic Construct
VPGAAVVTTASLYHA

SEQ ID NO: 463 - protein, 12 aa, synthetic construct
  REGION 1..12: note = Synthetic Construct
LVTTMALTLTQY

SEQ ID NO: 464 - protein, 14 aa, synthetic construct
  REGION 1..14: note = Synthetic Construct
RLLTPPPILDLKNY

SEQ ID NO: 465 - protein, 17 aa, synthetic construct
  REGION 1..17: note = Synthetic Construct
KKRDWSRDYVTNYDYDY

SEQ ID NO: 466 - protein, 10 aa, synthetic construct
  REGION 1..10: note = Synthetic Construct
RNPSTAEYDS

SEQ ID NO: 467 - protein, 12 aa, synthetic construct
  REGION 1..12: note = Synthetic Construct
WRFGPPGVKVDY

SEQ ID NO: 468 - protein, 19 aa, synthetic construct
  REGION 1..19: note = Synthetic Construct
LTHAAYLTAKSADRMDVSL

SEQ ID NO: 469 - protein, 13 aa, synthetic construct
  REGION 1..13: note = Synthetic Construct
GYNPTSRSSSYDY

SEQ ID NO: 470 - protein, 17 aa, synthetic construct
  REGION 1..17: note = Synthetic Construct
TANPYGDTWSVGTQYAY

SEQ ID NO: 471 - protein, 12 aa, synthetic construct
  REGION 1..12: note = Synthetic Construct
HAGNTAYRSGPY

SEQ ID NO: 472 - protein, 16 aa, synthetic construct
  REGION 1..16: note = Synthetic Construct
VLGRPYGTTWLDDIDV

SEQ ID NO: 473 - protein, 12 aa, synthetic construct
  REGION 1..12: note = Synthetic Construct
GRIVAKNADYDY

SEQ ID NO: 474 - protein, 18 aa, synthetic construct
  REGION 1..18: note = Synthetic Construct
GSTYYTERLLRTLNDYNY

SEQ ID NO: 475 - protein, 16 aa, synthetic construct
  REGION 1..16: note = Synthetic Construct
VLGRPYGRTWMDDIDA

SEQ ID NO: 476 - protein, 17 aa, synthetic construct
  REGION 1..17: note = Synthetic Construct
TPHLDGSAYCVSHYFDS

SEQ ID NO: 477 - protein, 18 aa, synthetic construct
  REGION 1..18: note = Synthetic Construct
ITADDPDDHLRNLRTYEN

SEQ ID NO: 478 - protein, 16 aa, synthetic construct
  REGION 1..16: note = Synthetic Construct
KPRGVGLTDRILDYDY

SEQ ID NO: 479 - protein, 13 aa, synthetic construct
  REGION 1..13: note = Synthetic Construct
VAPVEGTGRIRAY

SEQ ID NO: 480 - protein, 14 aa, synthetic construct
  REGION 1..14: note = Synthetic Construct
SWDSSGYSLSSYDY

SEQ ID NO: 481 - protein, 15 aa, synthetic construct
  REGION 1..15: note = Synthetic Construct
WRSGATWSREEGYDY

SEQ ID NO: 482 - protein, 16 aa, synthetic construct
  REGION 1..16: note = Synthetic Construct
DSTTYRLHSAGSDYHY

SEQ ID NO: 483 - protein, 18 aa, synthetic construct
  REGION 1..18: note = Synthetic Construct
SRPSYGSPLQHQPSGYDY

SEQ ID NO: 484 - protein, 14 aa, synthetic construct
  REGION 1..14: note = Synthetic Construct
DFAPQNGGIRNPTY

SEQ ID NO: 485 - protein, 16 aa, synthetic construct
  REGION 1..16: note = Synthetic Construct
DSSGTGWDYERRLFDY

SEQ ID NO: 486 - protein, 13 aa, synthetic construct
  REGION 1..13: note = Synthetic Construct
RSTSAVGTNQYNY

SEQ ID NO: 487 - protein, 15 aa, synthetic construct
  REGION 1..15: note = Synthetic Construct
ARTAGLTSNRSLYDY

SEQ ID NO: 488 - protein, 22 aa, synthetic construct
  REGION 1..22: note = Synthetic Construct
RHSQFAVGGIWYDRKSVSNYDY

SEQ ID NO: 489 - protein, 17 aa, synthetic construct
  REGION 1..17: note = Synthetic Construct
DKACYNGHYYRPGDYDY

SEQ ID NO: 490 - protein, 16 aa, synthetic construct
  REGION 1..16: note = Synthetic Construct
VLGRPYGSRWLDDVDA

SEQ ID NO: 491 - protein, 15 aa, synthetic construct
  REGION 1..15: note = Synthetic Construct
SRTAGLTSTRSLYDY

SEQ ID NO: 492 - protein, 15 aa, synthetic construct
  REGION 1..15: note = Synthetic Construct
RNGQVFFTNMDAYDY

SEQ ID NO: 493 - protein, 14 aa, synthetic construct
  REGION 1..14: note = Synthetic Construct
ETYSNYEKDYSWDY

SEQ ID NO: 494 - protein, 18 aa, synthetic construct
  REGION 1..18: note = Synthetic Construct
SRPSYGSPLQRQPAGYDY

SEQ ID NO: 495 - protein, 16 aa, synthetic construct
  REGION 1..16: note = Synthetic Construct
DSTLDRLHSAGSDYRY

SEQ ID NO: 496 - protein, 11 aa, synthetic construct
  REGION 1..11: note = Synthetic Construct
ETYSLYEKDDS

SEQ ID NO: 497 - protein, 11 aa, synthetic construct
  REGION 1..11: note = Synthetic Construct
DRIFDCVLYEK

SEQ ID NO: 498 - protein, 17 aa, synthetic construct
  REGION 1..17: note = Synthetic Construct
RRDSSWGYSRELFEYDY

SEQ ID NO: 499 - protein, 14 aa, synthetic construct
  REGION 1..14: note = Synthetic Construct
KADYVSSTPGVYDY

SEQ ID NO: 500 - protein, 14 aa, synthetic construct
  REGION 1..14: note = Synthetic Construct
SWDSSGYSLSSFDY

SEQ ID NO: 501 - protein, 6 aa, synthetic construct
  REGION 1..6: note = Synthetic Construct
ESGVNY

SEQ ID NO: 502 - protein, 11 aa, synthetic construct
  REGION 1..11: note = Synthetic Construct
KTYSNYEKDYS

SEQ ID NO: 503 - protein, 14 aa, synthetic construct
  REGION 1..14: note = Synthetic Construct
ARFYGRSMAGDYDS

SEQ ID NO: 504 - protein, 12 aa, synthetic construct
  REGION 1..12: note = Synthetic Construct
RKSINYVQEYDY

SEQ ID NO: 505 - protein, 15 aa, synthetic construct
  REGION 1..15: note = Synthetic Construct
PYTTAWPTKLGDYDY

SEQ ID NO: 506 - protein, 8 aa, synthetic construct
  REGION 1..8: note = Synthetic Construct
RTPYMRDH

SEQ ID NO: 507 - protein, 16 aa, synthetic construct
  REGION 1..16: note = Synthetic Construct
DPGTSLYMDRESEYNY

SEQ ID NO: 508 - protein, 15 aa, synthetic construct
  REGION 1..15: note = Synthetic Construct
RMPQMIITTPRAYDY

SEQ ID NO: 509 - protein, 14 aa, synthetic construct
  REGION 1..14: note = Synthetic Construct
RLLTPPPILDLKDW

SEQ ID NO: 510 - protein, 13 aa, synthetic construct
  REGION 1..13: note = Synthetic Construct
GRILSDSASDYTY

SEQ ID NO: 511 - protein, 19 aa, synthetic construct
  REGION 1..19: note = Synthetic Construct
DDGGGSYYDPSTREHYYDY

SEQ ID NO: 512 - protein, 15 aa, synthetic construct
  REGION 1..15: note = Synthetic Construct
NIGDYRRDPYTGYDT

SEQ ID NO: 513 - protein, 14 aa, synthetic construct
  REGION 1..14: note = Synthetic Construct
RLLTPPPILDLKDY

SEQ ID NO: 514 - protein, 15 aa, synthetic construct
  REGION 1..15: note = Synthetic Construct
RLFPGIATSSLDYGS

SEQ ID NO: 515 - protein, 15 aa, synthetic construct
  REGION 1..15: note = Synthetic Construct
SRTAGLTSNPFLYDS

SEQ ID NO: 516 - protein, 10 aa, synthetic construct
  REGION 1..10: note = Synthetic Construct
RSATTALYDD

SEQ ID NO: 517 - protein, 18 aa, synthetic construct
  REGION 1..18: note = Synthetic Construct
DRSEFGSRLYSDENEYDY

SEQ ID NO: 518 - protein, 15 aa, synthetic construct
  REGION 1..15: note = Synthetic Construct
DKWAVAHSDWVRYDY

SEQ ID NO: 519 - protein, 18 aa, synthetic construct
  REGION 1..18: note = Synthetic Construct
RSTGSFYYIGKRSNEYDY

SEQ ID NO: 520 - protein, 18 aa, synthetic construct
  REGION 1..18: note = Synthetic Construct
DLSALWHGIPTTARQFDS

SEQ ID NO: 521 - protein, 8 aa, synthetic construct
  REGION 1..8: note = Synthetic Construct
RTPYMREY

SEQ ID NO: 522 - protein, 11 aa, synthetic construct
  REGION 1..11: note = Synthetic Construct
ETYSLYEKEDS

SEQ ID NO: 523 - protein, 16 aa, synthetic construct
  REGION 1..16: note = Synthetic Construct
WAQPHTVRVAITTPNY

SEQ ID NO: 524 - protein, 16 aa, synthetic construct
  REGION 1..16: note = Synthetic Construct
VFESSSNYYDKTSYEY

SEQ ID NO: 525 - protein, 14 aa, synthetic construct
  REGION 1..14: note = Synthetic Construct
CKNYYICDPSARDW

SEQ ID NO: 526 - protein, 16 aa, synthetic construct
  REGION 1..16: note = Synthetic Construct
KSDAHYTPIHDYEYDY

SEQ ID NO: 527 - protein, 19 aa, synthetic construct
  REGION 1..19: note = Synthetic Construct
PLKIDYAIGRCLATMTGTT

SEQ ID NO: 528 - protein, 20 aa, synthetic construct
  REGION 1..20: note = Synthetic Construct
YSGRSQYYCSGEESLRDYDY

SEQ ID NO: 529 - protein, 14 aa, synthetic construct
  REGION 1..14: note = Synthetic Construct
RLLTPPPILDLKNF

SEQ ID NO: 530 - protein, 14 aa, synthetic construct
  REGION 1..14: note = Synthetic Construct
TLTDYETDRRGYGD

SEQ ID NO: 531 - protein, 14 aa, synthetic construct
  REGION 1..14: note = Synthetic Construct
ARFYGRSTARDYDS

SEQ ID NO: 532 - protein, 14 aa, synthetic construct
  REGION 1..14: note = Synthetic Construct
VAPRINPRGSPTNY

SEQ ID NO: 533 - protein, 18 aa, synthetic construct
  REGION 1..18: note = Synthetic Construct
SRPSYGLPLQRQPSLYDY

SEQ ID NO: 534 - protein, 11 aa, synthetic construct
  REGION 1..11: note = Synthetic Construct
DSYSIYERADS

SEQ ID NO: 535 - protein, 23 aa, synthetic construct
  REGION 1..23: note = Synthetic Construct
EEYSADGPYKRRGCMTASIWYKY

SEQ ID NO: 536 - protein, 7 aa, synthetic construct
  REGION 1..7: note = Synthetic Construct
WPTARAS

SEQ ID NO: 537 - protein, 12 aa, synthetic construct
  REGION 1..12: note = Synthetic Construct
DTAFHVRGSWPY

SEQ ID NO: 538 - protein, 15 aa, synthetic construct
  REGION 1..15: note = Synthetic Construct
RLRPIFGWGTRNFDS

SEQ ID NO: 539 - protein, 15 aa, synthetic construct
  REGION 1..15: note = Synthetic Construct
SRGPNLYPHIGDIEY

SEQ ID NO: 540 - protein, 13 aa, synthetic construct
  REGION 1..13: note = Synthetic Construct
DLNNFGRGWVAEY

SEQ ID NO: 541 - protein, 17 aa, synthetic construct
  REGION 1..17: note = Synthetic Construct
HWDNTQWYAYEVGGYEF

SEQ ID NO: 542 - protein, 18 aa, synthetic construct
  REGION 1..18: note = Synthetic Construct
DQAPLRFSYSLTRDEYDY

SEQ ID NO: 543 - protein, 15 aa, synthetic construct
  REGION 1..15: note = Synthetic Construct
AIRPSSSSSGYYESF

SEQ ID NO: 544 - protein, 16 aa, synthetic construct
  REGION 1..16: note = Synthetic Construct
QRSDSYSLGYEDDYAY

SEQ ID NO: 545 - protein, 15 aa, synthetic construct
  REGION 1..15: note = Synthetic Construct
VPGAAVVTTASIYHA

SEQ ID NO: 546 - protein, 11 aa, synthetic construct
  REGION 1..11: note = Synthetic Construct
GNEFTSTDRAN

SEQ ID NO: 547 - protein, 16 aa, synthetic construct
  REGION 1..16: note = Synthetic Construct
DSTTDRLHSAGSDYPY

SEQ ID NO: 548 - protein, 18 aa, synthetic construct
  REGION 1..18: note = Synthetic Construct
DLSALWHGVPTTARQYDY

SEQ ID NO: 549 - protein, 11 aa, synthetic construct
  REGION 1..11: note = Synthetic Construct
DSYSIYEKADS

SEQ ID NO: 550 - protein, 8 aa, synthetic construct
  REGION 1..8: note = Synthetic Construct
SPIIGSTY

SEQ ID NO: 551 - protein, 18 aa, synthetic construct
  REGION 1..18: note = Synthetic Construct
STRTYYSGRLYSAGEFEY

SEQ ID NO: 552 - protein, 17 aa, synthetic construct
  REGION 1..17: note = Synthetic Construct
DLDPDWYLQDHPDTYLY

SEQ ID NO: 553 - protein, 19 aa, synthetic construct
  REGION 1..19: note = Synthetic Construct
DDGGGSYYDPSTRLHFYDY

SEQ ID NO: 554 - protein, 13 aa, synthetic construct
  REGION 1..13: note = Synthetic Construct
GYNPTSRSAAYDY

SEQ ID NO: 555 - protein, 18 aa, synthetic construct
  REGION 1..18: note = Synthetic Construct
DQSPLVFGVPRSQGQYDY

SEQ ID NO: 556 - protein, 16 aa, synthetic construct
  REGION 1..16: note = Synthetic Construct
VLGRPYGSHWMDDMDY

SEQ ID NO: 557 - protein, 18 aa, synthetic construct
  REGION 1..18: note = Synthetic Construct
TSRTMIHTSQSLPINWDY

SEQ ID NO: 558 - protein, 8 aa, synthetic construct
  REGION 1..8: note = Synthetic Construct
RTPYIRDY

SEQ ID NO: 559 - protein, 18 aa, synthetic construct
  REGION 1..18: note = Synthetic Construct
DPTILYHAISQRTQTYRY

SEQ ID NO: 560 - protein, 8 aa, synthetic construct
  REGION 1..8: note = Synthetic Construct
RTPYRRDY

SEQ ID NO: 561 - protein, 8 aa, synthetic construct
  REGION 1..8: note = Synthetic Construct
RTPYVRDY

SEQ ID NO: 562 - protein, 8 aa, synthetic construct
  REGION 1..8: note = Synthetic Construct
GIPMTTVL

SEQ ID NO: 563 - protein, 15 aa, synthetic construct
  REGION 1..15: note = Synthetic Construct
RASSNTYDDPRSFAF

SEQ ID NO: 564 - protein, 18 aa, synthetic construct
  REGION 1..18: note = Synthetic Construct
DATRAYSSLSQRTDDYDY

SEQ ID NO: 565 - protein, 18 aa, synthetic construct
  REGION 1..18: note = Synthetic Construct
TATGWGSPVPRVPDRWDY

SEQ ID NO: 566 - protein, 21 aa, synthetic construct
  REGION 1..21: note = Synthetic Construct
EHARGFGGWSNPNPSDLVYSA

SEQ ID NO: 567 - protein, 15 aa, synthetic construct
  REGION 1..15: note = Synthetic Construct
RRSGGELTNRDFWDY

SEQ ID NO: 568 - protein, 11 aa, synthetic construct
  REGION 1..11: note = Synthetic Construct
DSYSIYEKDYS

SEQ ID NO: 569 - protein, 17 aa, synthetic construct
  REGION 1..17: note = Synthetic Construct
QSGRWYGIDCDSYDYDY

SEQ ID NO: 570 - protein, 15 aa, synthetic construct
  REGION 1..15: note = Synthetic Construct
RVFPGIATSSIDYAS

SEQ ID NO: 571 - protein, 18 aa, synthetic construct
  REGION 1..18: note = Synthetic Construct
DRTILYHGLSQRTQNYQF

SEQ ID NO: 572 - protein, 15 aa, synthetic construct
  REGION 1..15: note = Synthetic Construct
RLFPGIATSSLDYSP

SEQ ID NO: 573 - protein, 11 aa, synthetic construct
  REGION 1..11: note = Synthetic Construct
ETYSNYEKDHS

SEQ ID NO: 574 - protein, 16 aa, synthetic construct
  REGION 1..16: note = Synthetic Construct
AVITFRDGRGDQDYSY

SEQ ID NO: 575 - protein, 18 aa, synthetic construct
  REGION 1..18: note = Synthetic Construct
GGNHYDPSRYYIADEYDY

SEQ ID NO: 576 - protein, 16 aa, synthetic construct
  REGION 1..16: note = Synthetic Construct
QRSDSYSRGYEDDYDY

SEQ ID NO: 577 - protein, 21 aa, synthetic construct
  REGION 1..21: note = Synthetic Construct
REGPGASWYCSVNGYLTQPDS

SEQ ID NO: 578 - protein, 15 aa, synthetic construct
  REGION 1..15: note = Synthetic Construct
RVFPGIATSSLDYSS

SEQ ID NO: 579 - protein, 18 aa, synthetic construct
  REGION 1..18: note = Synthetic Construct
TATGWGSPIPSVPDRWDY

SEQ ID NO: 580 - protein, 11 aa, synthetic construct
  REGION 1..11: note = Synthetic Construct
ETYSNYEKAYS

SEQ ID NO: 581 - protein, 7 aa, synthetic construct
  REGION 1..7: note = Synthetic Construct
TTDDYDY

SEQ ID NO: 582 - protein, 11 aa, synthetic construct
  REGION 1..11: note = Synthetic Construct
ETYSLYEKADS

SEQ ID NO: 583 - protein, 15 aa, synthetic construct
  REGION 1..15: note = Synthetic Construct
ANWFGRSDDAGQYNY

SEQ ID NO: 584 - protein, 18 aa, synthetic construct
  REGION 1..18: note = Synthetic Construct
DPTILYHAISQRTQNYRA

SEQ ID NO: 585 - protein, 15 aa, synthetic construct
  REGION 1..15: note = Synthetic Construct
NVGDLWRNPYTGYDF

SEQ ID NO: 586 - protein, 18 aa, synthetic construct
  REGION 1..18: note = Synthetic Construct
DPTIPYHAISQRTQNYRY

SEQ ID NO: 587 - protein, 15 aa, synthetic construct
  REGION 1..15: note = Synthetic Construct
GIGDYMRDPYTPYDT

SEQ ID NO: 588 - protein, 16 aa, synthetic construct
  REGION 1..16: note = Synthetic Construct
KPRGVGLTDRIADYDY

SEQ ID NO: 589 - protein, 15 aa, synthetic construct
  REGION 1..15: note = Synthetic Construct
APTSPYATSRSDYPY

SEQ ID NO: 590 - protein, 15 aa, synthetic construct
  REGION 1..15: note = Synthetic Construct
SRTAGLTSNRYLYDY

SEQ ID NO: 591 - protein, 18 aa, synthetic construct
  REGION 1..18: note = Synthetic Construct
PRPSYGSPLQRQPSGYDY

SEQ ID NO: 592 - protein, 19 aa, synthetic construct
  REGION 1..19: note = Synthetic Construct
DTNPKYALHASDQSRDYDT

SEQ ID NO: 593 - protein, 15 aa, synthetic construct
  REGION 1..15: note = Synthetic Construct
SRTAGLTSNPSLYEY

SEQ ID NO: 594 - protein, 22 aa, synthetic construct
  REGION 1..22: note = Synthetic Construct
APKSSITAAQAMGVMEGREYSY

SEQ ID NO: 595 - protein, 16 aa, synthetic construct
  REGION 1..16: note = Synthetic Construct
DSNTDRLHSAGTEYRY

SEQ ID NO: 596 - protein, 8 aa, synthetic construct
  REGION 1..8: note = Synthetic Construct
RTPYMRYY

SEQ ID NO: 597 - protein, 13 aa, synthetic construct
  REGION 1..13: note = Synthetic Construct
GRIISTAPRDYEY

SEQ ID NO: 598 - protein, 17 aa, synthetic construct
  REGION 1..17: note = Synthetic Construct
RPAPYTDYDPTNSEYDY

SEQ ID NO: 599 - protein, 8 aa, synthetic construct
  REGION 1..8: note = Synthetic Construct
RTPYMQDY

SEQ ID NO: 600 - protein, 15 aa, synthetic construct
  REGION 1..15: note = Synthetic Construct
EHTVVGGGDLRVDDY

SEQ ID NO: 601 - protein, 18 aa, synthetic construct
  REGION 1..18: note = Synthetic Construct
SRPSYGSHLQRQPSGYDY

SEQ ID NO: 602 - protein, 16 aa, synthetic construct
  REGION 1..16: note = Synthetic Construct
DRGYSLYYYSSREYGY

SEQ ID NO: 603 - protein, 14 aa, synthetic construct
  REGION 1..14: note = Synthetic Construct
DRIFDCVLYGNYDF

SEQ ID NO: 604 - protein, 15 aa, synthetic construct
  REGION 1..15: note = Synthetic Construct
DLTVLLTANPRHYNY

SEQ ID NO: 605 - protein, 13 aa, synthetic construct
  REGION 1..13: note = Synthetic Construct
GPRLGSTPRAYDY

SEQ ID NO: 606 - protein, 13 aa, synthetic construct
  REGION 1..13: note = Synthetic Construct
GGWGIIQPISVDY

SEQ ID NO: 607 - protein, 17 aa, synthetic construct
  REGION 1..17: note = Synthetic Construct
SKDRYGSAWERREFDDD

SEQ ID NO: 608 - protein, 18 aa, synthetic construct
  REGION 1..18: note = Synthetic Construct
TSRTMIHTSQAMPINWDY

SEQ ID NO: 609 - protein, 20 aa, synthetic construct
  REGION 1..20: note = Synthetic Construct
DQSGGSAYYTRRRAQAGYDY

SEQ ID NO: 610 - protein, 15 aa, synthetic construct
  REGION 1..15: note = Synthetic Construct
SRGPNLYPHIGDVEY

SEQ ID NO: 611 - protein, 13 aa, synthetic construct
  REGION 1..13: note = Synthetic Construct
VAYDYSWGGPRNY

SEQ ID NO: 612 - protein, 18 aa, synthetic construct
  REGION 1..18: note = Synthetic Construct
YSTSHYYYTEIRGSEYDY

SEQ ID NO: 613 - protein, 15 aa, synthetic construct
  REGION 1..15: note = Synthetic Construct
ANWFGRSDDAGQYAY

SEQ ID NO: 614 - protein, 19 aa, synthetic construct
  REGION 1..19: note = Synthetic Construct
DTNPKYALHATDQSRDYDT

SEQ ID NO: 615 - protein, 15 aa, synthetic construct
  REGION 1..15: note = Synthetic Construct
NIGDYMRDPYTGYET

SEQ ID NO: 616 - protein, 9 aa, synthetic construct
  REGION 1..9: note = Synthetic Construct
DKWAVAHSD

SEQ ID NO: 617 - protein, 12 aa, synthetic construct
  REGION 1..12: note = Synthetic Construct
DTYSNYEKDYSS

SEQ ID NO: 618 - protein, 18 aa, synthetic construct
  REGION 1..18: note = Synthetic Construct
DITSWAMDPIYSTSRYDY

SEQ ID NO: 619 - protein, 14 aa, synthetic construct
  REGION 1..14: note = Synthetic Construct
GVRDFAPRIDSYDY

SEQ ID NO: 620 - protein, 8 aa, synthetic construct
  REGION 1..8: note = Synthetic Construct
RTPYMRAY

SEQ ID NO: 621 - protein, 18 aa, synthetic construct
  REGION 1..18: note = Synthetic Construct
GGNHYSRTKYYTADEYDY

SEQ ID NO: 622 - protein, 15 aa, synthetic construct
  REGION 1..15: note = Synthetic Construct
SHGVVDGTSVNAYRY

SEQ ID NO: 623 - protein, 14 aa, synthetic construct
  REGION 1..14: note = Synthetic Construct
QRSCHLPFNPTHDW

SEQ ID NO: 624 - protein, 14 aa, synthetic construct
  REGION 1..14: note = Synthetic Construct
DPRYDYYIPSSYNY

SEQ ID NO: 625 - protein, 18 aa, synthetic construct
  REGION 1..18: note = Synthetic Construct
SRPSYGSPLQRQSSGYDY

SEQ ID NO: 626 - protein, 17 aa, synthetic construct
  REGION 1..17: note = Synthetic Construct
SKDRYGSPWTRSEFEDY

SEQ ID NO: 627 - protein, 15 aa, synthetic construct
  REGION 1..15: note = Synthetic Construct
SRTAGLTSNRALYDY

SEQ ID NO: 628 - protein, 18 aa, synthetic construct
  REGION 1..18: note = Synthetic Construct
SRPSYGSPLRRQPSGYDY

SEQ ID NO: 629 - protein, 18 aa, synthetic construct
  REGION 1..18: note = Synthetic Construct
DRHVCSDYACGESSAYDY

SEQ ID NO: 630 - protein, 20 aa, synthetic construct
  REGION 1..20: note = Synthetic Construct
FSGRSQYYCSGYESLRDYDY

SEQ ID NO: 631 - protein, 20 aa, synthetic construct
  REGION 1..20: note = Synthetic Construct
AHGRVYGSRWFSSNRYDYPD

SEQ ID NO: 632 - protein, 15 aa, synthetic construct
  REGION 1..15: note = Synthetic Construct
RLFPGIATSSLDYSY

SEQ ID NO: 633 - protein, 19 aa, synthetic construct
  REGION 1..19: note = Synthetic Construct
DIDPPGMYAVTYNYRNYDY

SEQ ID NO: 634 - protein, 15 aa, synthetic construct
  REGION 1..15: note = Synthetic Construct
ANWFGRSDDAGQYDY

SEQ ID NO: 635 - protein, 13 aa, synthetic construct
  REGION 1..13: note = Synthetic Construct
VGQEASAYAPRNY

SEQ ID NO: 636 - protein, 13 aa, synthetic construct
  REGION 1..13: note = Synthetic Construct
DSREFGPIGQYDY

SEQ ID NO: 637 - protein, 7 aa, synthetic construct
  REGION 1..7: note = Synthetic Construct
EDILGTS

SEQ ID NO: 638 - protein, 20 aa, synthetic construct
  REGION 1..20: note = Synthetic Construct
AHGRVYGSRWFSTNPYDYPS

SEQ ID NO: 639 - protein, 17 aa, synthetic construct
  REGION 1..17: note = Synthetic Construct
DLLPGTYLHTAQNAYAY

SEQ ID NO: 640 - protein, 20 aa, synthetic construct
  REGION 1..20: note = Synthetic Construct
FSGRSQYYCSGYGSLRDFDY

SEQ ID NO: 641 - protein, 18 aa, synthetic construct
  REGION 1..18: note = Synthetic Construct
KSIMYYSRTYSRPSDYDY

SEQ ID NO: 642 - protein, 16 aa, synthetic construct
  REGION 1..16: note = Synthetic Construct
QRSDSYQRGYDDDYDY

SEQ ID NO: 643 - protein, 12 aa, synthetic construct
  REGION 1..12: note = Synthetic Construct
GRIVAENADYDY

SEQ ID NO: 644 - protein, 11 aa, synthetic construct
  REGION 1..11: note = Synthetic Construct
RGTATSGEYDS

SEQ ID NO: 645 - protein, 7 aa, synthetic construct
  REGION 1..7: note = Synthetic Construct
PSMGYDY

SEQ ID NO: 646 - protein, 21 aa, synthetic construct
  REGION 1..21: note = Synthetic Construct
GALTYYSGRYYLTCHPDGMDY

SEQ ID NO: 647 - protein, 15 aa, synthetic construct
  REGION 1..15: note = Synthetic Construct
RLFPGIATSSLDYSA

SEQ ID NO: 648 - protein, 17 aa, synthetic construct
  REGION 1..17: note = Synthetic Construct
DTLSMGNSVTDAHRYGY

SEQ ID NO: 649 - protein, 12 aa, synthetic construct
  REGION 1..12: note = Synthetic Construct
GVGVIVPFTAAS

SEQ ID NO: 650 - protein, 15 aa, synthetic construct
  REGION 1..15: note = Synthetic Construct
DQTTSSFTGARDVDY

SEQ ID NO: 651 - protein, 16 aa, synthetic construct
  REGION 1..16: note = Synthetic Construct
DSTIDRLHSAGSDYYY

SEQ ID NO: 652 - protein, 7 aa, synthetic construct
  REGION 1..7: note = Synthetic Construct
WQGNTRY

SEQ ID NO: 653 - protein, 17 aa, synthetic construct
  REGION 1..17: note = Synthetic Construct
DKDVYYGYTLHPNEYEY

SEQ ID NO: 654 - protein, 12 aa, synthetic construct
  REGION 1..12: note = Synthetic Construct
WRFGPTGVKVDY

SEQ ID NO: 655 - protein, 11 aa, synthetic construct
  REGION 1..11: note = Synthetic Construct
ETYSNYEKHYS

SEQ ID NO: 656 - protein, 12 aa, synthetic construct
  REGION 1..12: note = Synthetic Construct
ETYSNYEKDYSS

SEQ ID NO: 657 - protein, 15 aa, synthetic construct
  REGION 1..15: note = Synthetic Construct
RIFPGIATSSLDYSS

SEQ ID NO: 658 - protein, 8 aa, synthetic construct
  REGION 1..8: note = Synthetic Construct
RTPYMWDY

SEQ ID NO: 659 - protein, 16 aa, synthetic construct
  REGION 1..16: note = Synthetic Construct
DTTTYRLHSAGSDYRY

SEQ ID NO: 660 - protein, 16 aa, synthetic construct
  REGION 1..16: note = Synthetic Construct
GRPDSGTYYIPDEYIY

SEQ ID NO: 661 - protein, 15 aa, synthetic construct
  REGION 1..15: note = Synthetic Construct
DQTTSTFTGASDVNY

SEQ ID NO: 662 - protein, 17 aa, synthetic construct
  REGION 1..17: note = Synthetic Construct
RIGSIANLQPREYEFAY

SEQ ID NO: 663 - protein, 15 aa, synthetic construct
  REGION 1..15: note = Synthetic Construct
RSYPNTSRYLAAYDY

SEQ ID NO: 664 - protein, 12 aa, synthetic construct
  REGION 1..12: note = Synthetic Construct
GSLRVGSFSPDY

SEQ ID NO: 665 - protein, 16 aa, synthetic construct
  REGION 1..16: note = Synthetic Construct
KYGYLQPMGRDTVIDY

SEQ ID NO: 666 - protein, 11 aa, synthetic construct
  REGION 1..11: note = Synthetic Construct
PLQRQPSGYDY

SEQ ID NO: 667 - protein, 12 aa, synthetic construct
  REGION 1..12: note = Synthetic Construct
GSLRVGSFSVDY

SEQ ID NO: 668 - protein, 10 aa, synthetic construct
  REGION 1..10: note = Synthetic Construct
RNPSTAEYDY

SEQ ID NO: 669 - protein, 11 aa, synthetic construct
  REGION 1..11: note = Synthetic Construct
KTEAHYTPIHD

SEQ ID NO: 670 - protein, 18 aa, synthetic construct
  REGION 1..18: note = Synthetic Construct
ARPSYGLPLQRQPSGYDY

SEQ ID NO: 671 - protein, 18 aa, synthetic construct
  REGION 1..18: note = Synthetic Construct
PGTPYSGRLYSNDYEYDY

SEQ ID NO: 672 - protein, 11 aa, synthetic construct
  REGION 1..11: note = Synthetic Construct
WSSSNRYDYDS

SEQ ID NO: 673 - protein, 17 aa, synthetic construct
  REGION 1..17: note = Synthetic Construct
APYYSGRYYYNGGNYDY

SEQ ID NO: 674 - protein, 19 aa, synthetic construct
  REGION 1..19: note = Synthetic Construct
DTDPKYALHASDQSRDYDY

SEQ ID NO: 675 - protein, 20 aa, synthetic construct
  REGION 1..20: note = Synthetic Construct
SYGNVYGRSWTGKNIHDYTQ

SEQ ID NO: 676 - protein, 17 aa, synthetic construct
  REGION 1..17: note = Synthetic Construct
DKDVYYGYTSHPNEYEY

SEQ ID NO: 677 - protein, 18 aa, synthetic construct
  REGION 1..18: note = Synthetic Construct
GGNHYSSTKYYTADEYDY

SEQ ID NO: 678 - protein, 13 aa, synthetic construct
  REGION 1..13: note = Synthetic Construct
GGWGLRQPISVDY

SEQ ID NO: 679 - protein, 11 aa, synthetic construct
  REGION 1..11: note = Synthetic Construct
ETYSNYEKDYP

SEQ ID NO: 680 - protein, 24 aa, synthetic construct
  REGION 1..24: note = Synthetic Construct
VSDIFVRSCDDETMASIESSAFTY

SEQ ID NO: 681 - protein, 20 aa, synthetic construct
  REGION 1..20: note = Synthetic Construct
AHGRVYGSTWYSSNRWDYSA

SEQ ID NO: 682 - protein, 16 aa, synthetic construct
  REGION 1..16: note = Synthetic Construct
RQAVGPGIMSAATYDY

SEQ ID NO: 683 - protein, 8 aa, synthetic construct
  REGION 1..8: note = Synthetic Construct
RTPYMRNY

SEQ ID NO: 684 - protein, 15 aa, synthetic construct
  REGION 1..15: note = Synthetic Construct
RSAGNIESRPGQYDD

SEQ ID NO: 685 - protein, 22 aa, synthetic construct
  REGION 1..22: note = Synthetic Construct
GPKSSLTAAQAMGVMEGRNYIH

SEQ ID NO: 686 - protein, 20 aa, synthetic construct
  REGION 1..20: note = Synthetic Construct
FSGRSQYYCSGYESLRQYDY

SEQ ID NO: 687 - protein, 16 aa, synthetic construct
  REGION 1..16: note = Synthetic Construct
DTTTDRLHSAGSDYRY

SEQ ID NO: 688 - protein, 14 aa, synthetic construct
  REGION 1..14: note = Synthetic Construct
ETYSNYEKDYSCGY

SEQ ID NO: 689 - protein, 15 aa, synthetic construct
  REGION 1..15: note = Synthetic Construct
SRGPNLYAHIGDIEY

SEQ ID NO: 690 - protein, 17 aa, synthetic construct
  REGION 1..17: note = Synthetic Construct
RSQFYSSNYDQVRSYDY

SEQ ID NO: 691 - protein, 11 aa, synthetic construct
  REGION 1..11: note = Synthetic Construct
GLSVRSGQYDY

SEQ ID NO: 692 - protein, 18 aa, synthetic construct
  REGION 1..18: note = Synthetic Construct
SRPAYGSPLQRQPSGYDY

SEQ ID NO: 693 - protein, 19 aa, synthetic construct
  REGION 1..19: note = Synthetic Construct
CRQEFSWDFSSRDPDDFDY

SEQ ID NO: 694 - protein, 16 aa, synthetic construct
  REGION 1..16: note = Synthetic Construct
KPRGVGLTDRIQDYDY

SEQ ID NO: 695 - protein, 18 aa, synthetic construct
  REGION 1..18: note = Synthetic Construct
SRPSYGAPLQRRPSGYDY

SEQ ID NO: 696 - protein, 13 aa, synthetic construct
  REGION 1..13: note = Synthetic Construct
VGQEGSAYAPRVY

SEQ ID NO: 697 - protein, 20 aa, synthetic construct
  REGION 1..20: note = Synthetic Construct
FAGRSQYYCSGYESLRHYDY

SEQ ID NO: 698 - protein, 15 aa, synthetic construct
  REGION 1..15: note = Synthetic Construct
RRSGGELVNRDYCDY

SEQ ID NO: 699 - protein, 20 aa, synthetic construct
  REGION 1..20: note = Synthetic Construct
FSGRSQYYCSDYGSLRDFDY

SEQ ID NO: 700 - protein, 11 aa, synthetic construct
  REGION 1..11: note = Synthetic Construct
DPDDKLIPEHE

SEQ ID NO: 701 - protein, 9 aa, synthetic construct
  REGION 1..9: note = Synthetic Construct
FDLRDRLQW

SEQ ID NO: 702 - protein, 16 aa, synthetic construct
  REGION 1..16: note = Synthetic Construct
SPYTYSLLSRTGDYGY

SEQ ID NO: 703 - protein, 19 aa, synthetic construct
  REGION 1..19: note = Synthetic Construct
AKTTDWATRAPREMHEYAY

SEQ ID NO: 704 - protein, 17 aa, synthetic construct
  REGION 1..17: note = Synthetic Construct
DLGGLWHGVRTSRQYDY

SEQ ID NO: 705 - protein, 8 aa, synthetic construct
  REGION 1..8: note = Synthetic Construct
RTPYMRGY

SEQ ID NO: 706 - protein, 15 aa, synthetic construct
  REGION 1..15: note = Synthetic Construct
WRSGDSWSREEGYDY

SEQ ID NO: 707 - protein, 8 aa, synthetic construct
  REGION 1..8: note = Synthetic Construct
RTPYMRVY

SEQ ID NO: 708 - protein, 18 aa, synthetic construct
  REGION 1..18: note = Synthetic Construct
SRPAYGLPLQRQPSGYDY

SEQ ID NO: 709 - protein, 15 aa, synthetic construct
  REGION 1..15: note = Synthetic Construct
GIGHDYYTDEKGYHY

SEQ ID NO: 710 - protein, 18 aa, synthetic construct
  REGION 1..18: note = Synthetic Construct
GGNHYSRSKYYIAAEYDY

SEQ ID NO: 711 - protein, 20 aa, synthetic construct
  REGION 1..20: note = Synthetic Construct
FSGRSQYYCSGEESLRDYDF

SEQ ID NO: 712 - protein, 20 aa, synthetic construct
  REGION 1..20: note = Synthetic Construct
AHGRVYGSRWFSSNGYDYPS

SEQ ID NO: 713 - protein, 21 aa, synthetic construct
  REGION 1..21: note = Synthetic Construct
DLIEYYRSTYCYSTQPSSYDY

SEQ ID NO: 714 - protein, 15 aa, synthetic construct
  REGION 1..15: note = Synthetic Construct
RESPSTSVLVKNYDY

SEQ ID NO: 715 - protein, 17 aa, synthetic construct
  REGION 1..17: note = Synthetic Construct
DLDPDWYLQDHPDTYDY

SEQ ID NO: 716 - protein, 18 aa, synthetic construct
  REGION 1..18: note = Synthetic Construct
SRPSSGSPLQRQPSGYDY

SEQ ID NO: 717 - protein, 16 aa, synthetic construct
  REGION 1..16: note = Synthetic Construct
VLGRPYGSRWLDDVDY

SEQ ID NO: 718 - protein, 13 aa, synthetic construct
  REGION 1..13: note = Synthetic Construct
THGWTSRRSEYDY

SEQ ID NO: 719 - protein, 11 aa, synthetic construct
  REGION 1..11: note = Synthetic Construct
ETYSLYEKSDS

SEQ ID NO: 720 - protein, 11 aa, synthetic construct
  REGION 1..11: note = Synthetic Construct
DTYSNYEKEYS

SEQ ID NO: 721 - protein, 15 aa, synthetic construct
  REGION 1..15: note = Synthetic Construct
RLFPGIATTSLDYSS

SEQ ID NO: 722 - protein, 17 aa, synthetic construct
  REGION 1..17: note = Synthetic Construct
DRTFSLLTTPGTSGFRS

SEQ ID NO: 723 - protein, 12 aa, synthetic construct
  REGION 1..12: note = Synthetic Construct
DPSGLVRGVFEH

SEQ ID NO: 724 - protein, 18 aa, synthetic construct
  REGION 1..18: note = Synthetic Construct
YSAVRAFLSDYARYPPQS

SEQ ID NO: 725 - protein, 9 aa, synthetic construct
  REGION 1..9: note = Synthetic Construct
RSASGRYDY

SEQ ID NO: 726 - protein, 11 aa, synthetic construct
  REGION 1..11: note = Synthetic Construct
EIYSNYEKDYS

SEQ ID NO: 727 - protein, 15 aa, synthetic construct
  REGION 1..15: note = Synthetic Construct
RVFPGIATSSLDYFS

SEQ ID NO: 728 - protein, 11 aa, synthetic construct
  REGION 1..11: note = Synthetic Construct
RLFPGIATSSL

SEQ ID NO: 729 - protein, 16 aa, synthetic construct
  REGION 1..16: note = Synthetic Construct
VLGRPYGSRWLEDIDA

SEQ ID NO: 730 - protein, 11 aa, synthetic construct
  REGION 1..11: note = Synthetic Construct
GIATFSLDYSS

SEQ ID NO: 731 - protein, 13 aa, synthetic construct
  REGION 1..13: note = Synthetic Construct
RSTSAVGSDQFNY

SEQ ID NO: 732 - protein, 15 aa, synthetic construct
  REGION 1..15: note = Synthetic Construct
SRTAGLTSSRSLYDY

SEQ ID NO: 733 - protein, 25 aa, synthetic construct
  REGION 1..25: note = Synthetic Construct
DATRTYSSLSQRTDDYDYWGQGTQV

SEQ ID NO: 734 - protein, 15 aa, synthetic construct
  REGION 1..15: note = Synthetic Construct
RLFPGIATFSLDYAS

SEQ ID NO: 735 - protein, 20 aa, synthetic construct
  REGION 1..20: note = Synthetic Construct
AHARVYGASWSSSNRYDYDS

SEQ ID NO: 736 - protein, 19 aa, synthetic construct
  REGION 1..19: note = Synthetic Construct
DTAPKYALHASDQVRDYDY

SEQ ID NO: 737 - protein, 14 aa, synthetic construct
  REGION 1..14: note = Synthetic Construct
RRSCHLPFNPTHDY

SEQ ID NO: 738 - protein, 15 aa, synthetic construct
  REGION 1..15: note = Synthetic Construct
SRGYNIGKNPIGYTD

SEQ ID NO: 739 - protein, 8 aa, synthetic construct
  REGION 1..8: note = Synthetic Construct
RTPYMRDF

SEQ ID NO: 740 - protein, 18 aa, synthetic construct
  REGION 1..18: note = Synthetic Construct
SRPSYGSPLQRQPPGYDY

SEQ ID NO: 741 - protein, 22 aa, synthetic construct
  REGION 1..22: note = Synthetic Construct
GPKSSLTAAQAMGVMEGRHYVH

SEQ ID NO: 742 - protein, 17 aa, synthetic construct
  REGION 1..17: note = Synthetic Construct
HWDNTQWYVYEVDGYAF

SEQ ID NO: 743 - protein, 8 aa, synthetic construct
  REGION 1..8: note = Synthetic Construct
YDLRDRLQ

SEQ ID NO: 744 - protein, 17 aa, synthetic construct
  REGION 1..17: note = Synthetic Construct
DVCTISGSYYYTGANFH

SEQ ID NO: 745 - protein, 18 aa, synthetic construct
  REGION 1..18: note = Synthetic Construct
SRPSYGSPLQRHPSGYDY

SEQ ID NO: 746 - protein, 18 aa, synthetic construct
  REGION 1..18: note = Synthetic Construct
SRPSCGLPLQRQPSGYDY

SEQ ID NO: 747 - protein, 11 aa, synthetic construct
  REGION 1..11: note = Synthetic Construct
ETYTLYEKDTS

SEQ ID NO: 748 - protein, 13 aa, synthetic construct
  REGION 1..13: note = Synthetic Construct
DSRSSYNLPNYAY

SEQ ID NO: 749 - protein, 18 aa, synthetic construct
  REGION 1..18: note = Synthetic Construct
SRPSCGSPLQRQPSGYDY

SEQ ID NO: 750 - protein, 22 aa, synthetic construct
  REGION 1..22: note = Synthetic Construct
DLMRRMMYGKSWWCLNKNDFGS

SEQ ID NO: 751 - protein, 11 aa, synthetic construct
  REGION 1..11: note = Synthetic Construct
GIATSSLDYSS

SEQ ID NO: 752 - protein, 19 aa, synthetic construct
  REGION 1..19: note = Synthetic Construct
DITDYSRDYVHNFDFNYDY

SEQ ID NO: 753 - protein, 21 aa, synthetic construct
  REGION 1..21: note = Synthetic Construct
VFTRNSWYIPDHGTRPDEYAG

SEQ ID NO: 754 - protein, 8 aa, synthetic construct
  REGION 1..8: note = Synthetic Construct
RTPYMRDS

SEQ ID NO: 755 - protein, 18 aa, synthetic construct
  REGION 1..18: note = Synthetic Construct
GGNHYSPSKYFTADEYDH

SEQ ID NO: 756 - protein, 8 aa, synthetic construct
  REGION 1..8: note = Synthetic Construct
RTPYMRDN

SEQ ID NO: 757 - protein, 20 aa, synthetic construct
  REGION 1..20: note = Synthetic Construct
AHARVYGANWSSSNRYDYSS

SEQ ID NO: 758 - protein, 16 aa, synthetic construct
  REGION 1..16: note = Synthetic Construct
VLGRPYGSHWLSDIDA

SEQ ID NO: 759 - protein, 15 aa, synthetic construct
  REGION 1..15: note = Synthetic Construct
RRPNLLITDPQAFDS

SEQ ID NO: 760 - protein, 15 aa, synthetic construct
  REGION 1..15: note = Synthetic Construct
VTGGTDYWGQGTQVT

SEQ ID NO: 761 - protein, 11 aa, synthetic construct
  REGION 1..11: note = Synthetic Construct
SRPSYGLPLQR

SEQ ID NO: 762 - protein, 11 aa, synthetic construct
  REGION 1..11: note = Synthetic Construct
NTLNSQLLPRA

SEQ ID NO: 763 - protein, 20 aa, synthetic construct
  REGION 1..20: note = Synthetic Construct
AHARVYGTNWSSSNRYDYDS

SEQ ID NO: 764 - protein, 13 aa, synthetic construct
  REGION 1..13: note = Synthetic Construct
VGQVGSAYAPRAY

SEQ ID NO: 765 - protein, 12 aa, synthetic construct
  REGION 1..12: note = Synthetic Construct
GSVSQYSRQYAY

SEQ ID NO: 766 - protein, 7 aa, synthetic construct
  REGION 1..7: note = Synthetic Construct
IDDLSDY

SEQ ID NO: 767 - protein, 11 aa, synthetic construct
  REGION 1..11: note = Synthetic Construct
ETYSNYEKDYC

SEQ ID NO: 768 - protein, 15 aa, synthetic construct
  REGION 1..15: note = Synthetic Construct
DTGGVVTTAWNEYEY

SEQ ID NO: 769 - protein, 22 aa, synthetic construct
  REGION 1..22: note = Synthetic Construct
APKSSLTAAQAMGVMEGRDYAH

SEQ ID NO: 770 - protein, 15 aa, synthetic construct
  REGION 1..15: note = Synthetic Construct
RLFPGIATSSLDYDS

SEQ ID NO: 771 - protein, 7 aa, synthetic construct
  REGION 1..7: note = Synthetic Construct
VDDAMDY

SEQ ID NO: 772 - protein, 12 aa, synthetic construct
  REGION 1..12: note = Synthetic Construct
DPSGLTRGVFEH

SEQ ID NO: 773 - protein, 18 aa, synthetic construct
  REGION 1..18: note = Synthetic Construct
RSVTQYTIVLSNPIHYDY

SEQ ID NO: 774 - protein, 20 aa, synthetic construct
  REGION 1..20: note = Synthetic Construct
EHARVYGANWSSSNRYDYDS

SEQ ID NO: 775 - protein, 16 aa, synthetic construct
  REGION 1..16: note = Synthetic Construct
VIGRPYGRHWLDDIDV

SEQ ID NO: 776 - protein, 15 aa, synthetic construct
  REGION 1..15: note = Synthetic Construct
SDGVVDGTSANDYRY

SEQ ID NO: 777 - protein, 16 aa, synthetic construct
  REGION 1..16: note = Synthetic Construct
DSSTSRLHSAGSDYRY

SEQ ID NO: 778 - protein, 11 aa, synthetic construct
  REGION 1..11: note = Synthetic Construct
ETYSTYEKDYS

SEQ ID NO: 779 - protein, 16 aa, synthetic construct
  REGION 1..16: note = Synthetic Construct
APTWYNDRARDELFHY

SEQ ID NO: 780 - protein, 11 aa, synthetic construct
  REGION 1..11: note = Synthetic Construct
VPGAAVVTTAS

SEQ ID NO: 781 - protein, 11 aa, synthetic construct
  REGION 1..11: note = Synthetic Construct
TTRIFNLPRDY

SEQ ID NO: 782 - protein, 11 aa, synthetic construct
  REGION 1..11: note = Synthetic Construct
DTYSLYEKDSS

SEQ ID NO: 783 - protein, 16 aa, synthetic construct
  REGION 1..16: note = Synthetic Construct
DSTLDRLHSAGTDYRY

SEQ ID NO: 784 - protein, 14 aa, synthetic construct
  REGION 1..14: note = Synthetic Construct
VGPRANPPGTPTNY

SEQ ID NO: 785 - protein, 18 aa, synthetic construct
  REGION 1..18: note = Synthetic Construct
DRAILYHAISQRTQNYQY

SEQ ID NO: 786 - protein, 13 aa, synthetic construct
  REGION 1..13: note = Synthetic Construct
DLRPSPSSPEYNL

SEQ ID NO: 787 - protein, 12 aa, synthetic construct
  REGION 1..12: note = Synthetic Construct
RQGCSHNGCDEY

SEQ ID NO: 788 - protein, 10 aa, synthetic construct
  REGION 1..10: note = Synthetic Construct
SHLSSVSLNT

SEQ ID NO: 789 - protein, 13 aa, synthetic construct
  REGION 1..13: note = Synthetic Construct
GDPYGVGLRDYEY

SEQ ID NO: 790 - protein, 15 aa, synthetic construct
  REGION 1..15: note = Synthetic Construct
DRGPELTKIAPDYDY

SEQ ID NO: 791 - protein, 14 aa, synthetic construct
  REGION 1..14: note = Synthetic Construct
VGPGINPRGSPTNY

SEQ ID NO: 792 - protein, 13 aa, synthetic construct
  REGION 1..13: note = Synthetic Construct
VGQEAGAYGPRAY

SEQ ID NO: 793 - protein, 8 aa, synthetic construct
  REGION 1..8: note = Synthetic Construct
RDAYLSEY

SEQ ID NO: 794 - protein, 15 aa, synthetic construct
  REGION 1..15: note = Synthetic Construct
SDRYDRDLRAPRYDY

SEQ ID NO: 795 - protein, 21 aa, synthetic construct
  REGION 1..21: note = Synthetic Construct
EHARGFGGRGNPNPSDLVYDA

SEQ ID NO: 796 - protein, 6 aa, synthetic construct
  REGION 1..6: note = Synthetic Construct
TGVGVY

SEQ ID NO: 797 - protein, 14 aa, synthetic construct
  REGION 1..14: note = Synthetic Construct
RLLTPPPILDLKNL

SEQ ID NO: 798 - protein, 13 aa, synthetic construct
  REGION 1..13: note = Synthetic Construct
RSTSAVGYNQYNT

SEQ ID NO: 799 - protein, 15 aa, synthetic construct
  REGION 1..15: note = Synthetic Construct
SRAIVSGIDANSYDY

SEQ ID NO: 800 - protein, 18 aa, synthetic construct
  REGION 1..18: note = Synthetic Construct
DLAPLRFAIPRTHGQYDY

SEQ ID NO: 801 - protein, 15 aa, synthetic construct
  REGION 1..15: note = Synthetic Construct
CKFRLSLICHPGQDY

SEQ ID NO: 802 - protein, 15 aa, synthetic construct
  REGION 1..15: note = Synthetic Construct
CKFRLSVICHPGQDY

SEQ ID NO: 803 - protein, 16 aa, synthetic construct
  REGION 1..16: note = Synthetic Construct
KERTLVVYTVKEMYEF

SEQ ID NO: 804 - protein, 15 aa, synthetic construct
  REGION 1..15: note = Synthetic Construct
SDGVIDGTSANGYPY

SEQ ID NO: 805 - protein, 15 aa, synthetic construct
  REGION 1..15: note = Synthetic Construct
SRILVPPSTPGDYDS

SEQ ID NO: 806 - protein, 20 aa, synthetic construct
  REGION 1..20: note = Synthetic Construct
YGGYRWYGDSSPPTSRLYDY

SEQ ID NO: 807 - protein, 19 aa, synthetic construct
  REGION 1..19: note = Synthetic Construct
DADPPASYATSEYSRHYDY

SEQ ID NO: 808 - protein, 15 aa, synthetic construct
  REGION 1..15: note = Synthetic Construct
SRTAGLTSNRHLYDS

SEQ ID NO: 809 - protein, 16 aa, synthetic construct
  REGION 1..16: note = Synthetic Construct
APTWYSDRARDELFHY

SEQ ID NO: 810 - protein, 18 aa, synthetic construct
  REGION 1..18: note = Synthetic Construct
DSRVSVELFATSFGAFEY

SEQ ID NO: 811 - protein, 11 aa, synthetic construct
  REGION 1..11: note = Synthetic Construct
ETYSLYEKDSS

SEQ ID NO: 812 - protein, 15 aa, synthetic construct
  REGION 1..15: note = Synthetic Construct
SDGVIDGTSANSYRY

SEQ ID NO: 813 - protein, 15 aa, synthetic construct
  REGION 1..15: note = Synthetic Construct
TAGGIIGTSTTWYDY

SEQ ID NO: 814 - protein, 15 aa, synthetic construct
  REGION 1..15: note = Synthetic Construct
SRTAGLTSNRSLYVY

SEQ ID NO: 815 - protein, 14 aa, synthetic construct
  REGION 1..14: note = Synthetic Construct
DRSTVFRNPMLYDY

SEQ ID NO: 816 - protein, 16 aa, synthetic construct
  REGION 1..16: note = Synthetic Construct
DRSCNYYSDPGHLYDW

SEQ ID NO: 817 - protein, 7 aa, synthetic construct
  REGION 1..7: note = Synthetic Construct
GMVKYDF

SEQ ID NO: 818 - protein, 11 aa, synthetic construct
  REGION 1..11: note = Synthetic Construct
ETYSIYEKDSS

SEQ ID NO: 819 - protein, 15 aa, synthetic construct
  REGION 1..15: note = Synthetic Construct
CKFRLSVLCQPGQDY

SEQ ID NO: 820 - protein, 13 aa, synthetic construct
  REGION 1..13: note = Synthetic Construct
TAYSPIYKSVRDY

SEQ ID NO: 821 - protein, 15 aa, synthetic construct
  REGION 1..15: note = Synthetic Construct
CKFRLAVLCHPGQDY

SEQ ID NO: 822 - protein, 15 aa, synthetic construct
  REGION 1..15: note = Synthetic Construct
LLRCDDSWPLSRFHS

SEQ ID NO: 823 - protein, 11 aa, synthetic construct
  REGION 1..11: note = Synthetic Construct
APRWYSDRAET

SEQ ID NO: 824 - protein, 13 aa, synthetic construct
  REGION 1..13: note = Synthetic Construct
GGWGITQPIIVDY

SEQ ID NO: 825 - protein, 16 aa, synthetic construct
  REGION 1..16: note = Synthetic Construct
APRWYSDRARDELFHY

SEQ ID NO: 826 - protein, 18 aa, synthetic construct
  REGION 1..18: note = Synthetic Construct
DPTVLYHAISERTQNYRY

SEQ ID NO: 827 - protein, 21 aa, synthetic construct
  REGION 1..21: note = Synthetic Construct
EHARGFGGLGNPNPSDLVYSA

SEQ ID NO: 828 - protein, 15 aa, synthetic construct
  REGION 1..15: note = Synthetic Construct
WRSGSSWSREEGYDY

SEQ ID NO: 829 - protein, 21 aa, synthetic construct
  REGION 1..21: note = Synthetic Construct
EHARGFGGESNPNPSDLVYSA

SEQ ID NO: 830 - protein, 18 aa, synthetic construct
  REGION 1..18: note = Synthetic Construct
GVLRNDYSDYVDKNEYNY

SEQ ID NO: 831 - protein, 18 aa, synthetic construct
  REGION 1..18: note = Synthetic Construct
GGNHYDSSKYYIADEYDY

SEQ ID NO: 832 - protein, 11 aa, synthetic construct
  REGION 1..11: note = Synthetic Construct
RLLTPPPILDL

SEQ ID NO: 833 - protein, 18 aa, synthetic construct
  REGION 1..18: note = Synthetic Construct
DQSPLRFALPRSQGQFDY

SEQ ID NO: 834 - protein, 18 aa, synthetic construct
  REGION 1..18: note = Synthetic Construct
SRTVLDDGVKLHGNHYDY

SEQ ID NO: 835 - protein, 15 aa, synthetic construct
  REGION 1..15: note = Synthetic Construct
SRAIVSGIDANSYEY

SEQ ID NO: 836 - protein, 13 aa, synthetic construct
  REGION 1..13: note = Synthetic Construct
VGQEASARAPRVY

SEQ ID NO: 837 - protein, 15 aa, synthetic construct
  REGION 1..15: note = Synthetic Construct
ATGADGLRDFRQYPY

SEQ ID NO: 838 - protein, 22 aa, synthetic construct
  REGION 1..22: note = Synthetic Construct
DLLRPMMNGKSWWCLNKNDFGS

SEQ ID NO: 839 - protein, 12 aa, synthetic construct
  REGION 1..12: note = Synthetic Construct
DPQGLVRGEFEH

SEQ ID NO: 840 - protein, 15 aa, synthetic construct
  REGION 1..15: note = Synthetic Construct
SAGGIIGTSIGWYDY

SEQ ID NO: 841 - protein, 9 aa, synthetic construct
  REGION 1..9: note = Synthetic Construct
SPPDRDWDY

SEQ ID NO: 842 - protein, 8 aa, synthetic construct
  REGION 1..8: note = Synthetic Construct
ESMTRAQI

SEQ ID NO: 843 - protein, 15 aa, synthetic construct
  REGION 1..15: note = Synthetic Construct
SRAIVSGIDANSYDN

SEQ ID NO: 844 - protein, 20 aa, synthetic construct
  REGION 1..20: note = Synthetic Construct
EAYPTYCSDSQYGDRYQFCY

SEQ ID NO: 845 - protein, 9 aa, synthetic construct
  REGION 1..9: note = Synthetic Construct
TGPRLPDIY

SEQ ID NO: 846 - protein, 13 aa, synthetic construct
  REGION 1..13: note = Synthetic Construct
VAPVEGTGGIRAY

SEQ ID NO: 847 - protein, 14 aa, synthetic construct
  REGION 1..14: note = Synthetic Construct
CKNYYICDPSAREW

SEQ ID NO: 848 - protein, 16 aa, synthetic construct
  REGION 1..16: note = Synthetic Construct
DRRGDYVLGYHGLYDY

SEQ ID NO: 849 - protein, 11 aa, synthetic construct
  REGION 1..11: note = Synthetic Construct
VDDQNGLLGPG

SEQ ID NO: 850 - protein, 20 aa, synthetic construct
  REGION 1..20: note = Synthetic Construct
DWAHTCPAYGSSRYITDFVS

SEQ ID NO: 851 - protein, 18 aa, synthetic construct
  REGION 1..18: note = Synthetic Construct
DRTSLSYGFTRNVLQYEY

SEQ ID NO: 852 - protein, 21 aa, synthetic construct
  REGION 1..21: note = Synthetic Construct
EHARGFGGWGNPNPTDLVYDV

SEQ ID NO: 853 - protein, 15 aa, synthetic construct
  REGION 1..15: note = Synthetic Construct
PYTTAWGTKTSDFDY

SEQ ID NO: 854 - protein, 23 aa, synthetic construct
  REGION 1..23: note = Synthetic Construct
DVGRDLCTIVPGTRTITISPFGA

SEQ ID NO: 855 - protein, 11 aa, synthetic construct
  REGION 1..11: note = Synthetic Construct
ETYSIYEKADS

SEQ ID NO: 856 - protein, 23 aa, synthetic construct
  REGION 1..23: note = Synthetic Construct
EEYSGTDSYTRRGCMTASIWYKY

SEQ ID NO: 857 - protein, 18 aa, synthetic construct
  REGION 1..18: note = Synthetic Construct
AGTPFSSIDLTRVSGYTY

SEQ ID NO: 858 - protein, 14 aa, synthetic construct
  REGION 1..14: note = Synthetic Construct
AKGRYGSIWNDYDY

SEQ ID NO: 859 - protein, 18 aa, synthetic construct
  REGION 1..18: note = Synthetic Construct
ETSRRLSALSRRIHDYDY

SEQ ID NO: 860 - protein, 20 aa, synthetic construct
  REGION 1..20: note = Synthetic Construct
DWAHTCPAYGSRRYITDFVS

SEQ ID NO: 861 - protein, 19 aa, synthetic construct
  REGION 1..19: note = Synthetic Construct
DENTYEDYFNSNFDRKYDY

SEQ ID NO: 862 - protein, 15 aa, synthetic construct
  REGION 1..15: note = Synthetic Construct
NIGDYRRDTYTGYDT

SEQ ID NO: 863 - protein, 18 aa, synthetic construct
  REGION 1..18: note = Synthetic Construct
ADVSLVWNIVLDVPGYDY

SEQ ID NO: 864 - protein, 15 aa, synthetic construct
  REGION 1..15: note = Synthetic Construct
CKFGLSVLCHPGQDY

SEQ ID NO: 865 - protein, 20 aa, synthetic construct
  REGION 1..20: note = Synthetic Construct
AHGRVYGANWSSSNRYDYDS

SEQ ID NO: 866 - protein, 15 aa, synthetic construct
  REGION 1..15: note = Synthetic Construct
YKFRLSVLCQPGQDY

SEQ ID NO: 867 - protein, 16 aa, synthetic construct
  REGION 1..16: note = Synthetic Construct
ARFQYGYSHDEGEYDY

SEQ ID NO: 868 - protein, 17 aa, synthetic construct
  REGION 1..17: note = Synthetic Construct
RKVDYSRDYVTNYGYDY

SEQ ID NO: 869 - protein, 18 aa, synthetic construct
  REGION 1..18: note = Synthetic Construct
DRSPLYFALPRSQGQFDY

SEQ ID NO: 870 - protein, 18 aa, synthetic construct
  REGION 1..18: note = Synthetic Construct
APATLPAATMTEERMWNY

SEQ ID NO: 871 - protein, 16 aa, synthetic construct
  REGION 1..16: note = Synthetic Construct
DVNTDRLHSAGTEYRY

SEQ ID NO: 872 - protein, 9 aa, synthetic construct
  REGION 1..9: note = Synthetic Construct
RMADGSPDT

SEQ ID NO: 873 - protein, 14 aa, synthetic construct
  REGION 1..14: note = Synthetic Construct
QRSCHLPFDPMHDW

SEQ ID NO: 874 - protein, 17 aa, synthetic construct
  REGION 1..17: note = Synthetic Construct
REEITSYFRTIASYYNK

SEQ ID NO: 875 - protein, 16 aa, synthetic construct
  REGION 1..16: note = Synthetic Construct
RGYYGGTYRFPSDYEL

SEQ ID NO: 876 - protein, 17 aa, synthetic construct
  REGION 1..17: note = Synthetic Construct
KQGPLYPYIYLSRGYNH

SEQ ID NO: 877 - protein, 15 aa, synthetic construct
  REGION 1..15: note = Synthetic Construct
NIGDYMRDPYTGHDT

SEQ ID NO: 878 - protein, 16 aa, synthetic construct
  REGION 1..16: note = Synthetic Construct
RKETTVVTMSVRDYSY

SEQ ID NO: 879 - protein, 17 aa, synthetic construct
  REGION 1..17: note = Synthetic Construct
DSRGCAWGGSAYYTFSY

SEQ ID NO: 880 - protein, 15 aa, synthetic construct
  REGION 1..15: note = Synthetic Construct
NKRSPYHTSSGLIEF

SEQ ID NO: 881 - protein, 11 aa, synthetic construct
  REGION 1..11: note = Synthetic Construct
DTYSLYEKASS

SEQ ID NO: 882 - protein, 13 aa, synthetic construct
  REGION 1..13: note = Synthetic Construct
RSGFGLGVLKYDY

SEQ ID NO: 883 - protein, 17 aa, synthetic construct
  REGION 1..17: note = Synthetic Construct
KQGPLYPYIYLSRGYDH

SEQ ID NO: 884 - protein, 16 aa, synthetic construct
  REGION 1..16: note = Synthetic Construct
DFGMSYYYMRTSEYEY

SEQ ID NO: 885 - protein, 14 aa, synthetic construct
  REGION 1..14: note = Synthetic Construct
RLLTPPPILDLKDF

SEQ ID NO: 886 - protein, 14 aa, synthetic construct
  REGION 1..14: note = Synthetic Construct
VGPRINPPGTPTNY

SEQ ID NO: 887 - protein, 14 aa, synthetic construct
  REGION 1..14: note = Synthetic Construct
VGPRINPPGSPTNY

SEQ ID NO: 888 - protein, 17 aa, synthetic construct
  REGION 1..17: note = Synthetic Construct
DKACFNAHYYRPRDYDY

SEQ ID NO: 889 - protein, 22 aa, synthetic construct
  REGION 1..22: note = Synthetic Construct
DLLRRMLPGSSWWCLNPNDFGS

SEQ ID NO: 890 - protein, 16 aa, synthetic construct
  REGION 1..16: note = Synthetic Construct
DTTLDRLHSEGSDYRY

SEQ ID NO: 891 - protein, 15 aa, synthetic construct
  REGION 1..15: note = Synthetic Construct
SIGDYMRDPYIGSDT

SEQ ID NO: 892 - protein, 22 aa, synthetic construct
  REGION 1..22: note = Synthetic Construct
DLLRRMMSGSSWWCLNKNDFGS

SEQ ID NO: 893 - protein, 15 aa, synthetic construct
  REGION 1..15: note = Synthetic Construct
CKFRLSALCHPGQDY

SEQ ID NO: 894 - protein, 13 aa, synthetic construct
  REGION 1..13: note = Synthetic Construct
GYNPTSRSSMYDY

SEQ ID NO: 895 - protein, 16 aa, synthetic construct
  REGION 1..16: note = Synthetic Construct
APGVFQFSMDKGAYTY

SEQ ID NO: 896 - protein, 15 aa, synthetic construct
  REGION 1..15: note = Synthetic Construct
QRGVFPLGDASRYAY

SEQ ID NO: 897 - protein, 14 aa, synthetic construct
  REGION 1..14: note = Synthetic Construct
DRSTCFSNYRLYDY

SEQ ID NO: 898 - protein, 16 aa, synthetic construct
  REGION 1..16: note = Synthetic Construct
DRGYSLMYYRSSEYTY

SEQ ID NO: 899 - protein, 15 aa, synthetic construct
  REGION 1..15: note = Synthetic Construct
PFTTAWGTKLSDYDY

SEQ ID NO: 900 - protein, 11 aa, synthetic construct
  REGION 1..11: note = Synthetic Construct
ETYSVYKDENS

SEQ ID NO: 901 - protein, 17 aa, synthetic construct
  REGION 1..17: note = Synthetic Construct
SRYRSSRPMGNIIDYRY

SEQ ID NO: 902 - protein, 15 aa, synthetic construct
  REGION 1..15: note = Synthetic Construct
SRTAGLTSNRHLYDY

SEQ ID NO: 903 - protein, 15 aa, synthetic construct
  REGION 1..15: note = Synthetic Construct
ARSHDTLMGTGLLDW

SEQ ID NO: 904 - protein, 18 aa, synthetic construct
  REGION 1..18: note = Synthetic Construct
DRAPLRFAIPRTHGQYDY

SEQ ID NO: 905 - protein, 11 aa, synthetic construct
  REGION 1..11: note = Synthetic Construct
RVLEGTGYRDY

SEQ ID NO: 906 - protein, 18 aa, synthetic construct
  REGION 1..18: note = Synthetic Construct
SRTVLDDGVKLYGNHYDY

SEQ ID NO: 907 - protein, 17 aa, synthetic construct
  REGION 1..17: note = Synthetic Construct
SYYSGSQRFPRLMDYDF

SEQ ID NO: 908 - protein, 21 aa, synthetic construct
  REGION 1..21: note = Synthetic Construct
EHARGFGGWGNPNPSDLVYRA

SEQ ID NO: 909 - protein, 11 aa, synthetic construct
  REGION 1..11: note = Synthetic Construct
ETYSIYEKASS

SEQ ID NO: 910 - protein, 14 aa, synthetic construct
  REGION 1..14: note = Synthetic Construct
ASTNTPVTVAAVDY

SEQ ID NO: 911 - protein, 15 aa, synthetic construct
  REGION 1..15: note = Synthetic Construct
DPNLHHLRIGDPYYE

SEQ ID NO: 912 - protein, 14 aa, synthetic construct
  REGION 1..14: note = Synthetic Construct
VAPGINPRGSPTNY

SEQ ID NO: 913 - protein, 22 aa, synthetic construct
  REGION 1..22: note = Synthetic Construct
KTRPGRYSGSDFYYRDLNDYDN

SEQ ID NO: 914 - protein, 22 aa, synthetic construct
  REGION 1..22: note = Synthetic Construct
KTRPGRYSGSDFYYRNLNDYDN

SEQ ID NO: 915 - protein, 16 aa, synthetic construct
  REGION 1..16: note = Synthetic Construct
CSASHYYCSGASKYDF

SEQ ID NO: 916 - protein, 21 aa, synthetic construct
  REGION 1..21: note = Synthetic Construct
DSAPGTSPDRNYYTRQIGYDY

SEQ ID NO: 917 - protein, 15 aa, synthetic construct
  REGION 1..15: note = Synthetic Construct
RKFRLSVLCHPGQDY

SEQ ID NO: 918 - protein, 15 aa, synthetic construct
  REGION 1..15: note = Synthetic Construct
EHTVVGGGDLRVNDY

SEQ ID NO: 919 - protein, 17 aa, synthetic construct
  REGION 1..17: note = Synthetic Construct
REEITSYFRTSAGYYNR

SEQ ID NO: 920 - protein, 18 aa, synthetic construct
  REGION 1..18: note = Synthetic Construct
DQAPLRFSYSLRRDEYDY

SEQ ID NO: 921 - protein, 9 aa, synthetic construct
  REGION 1..9: note = Synthetic Construct
TGPRLPEIY

SEQ ID NO: 922 - protein, 18 aa, synthetic construct
  REGION 1..18: note = Synthetic Construct
ETSRRLSTLSQRIHDYDY

SEQ ID NO: 923 - protein, 19 aa, synthetic construct
  REGION 1..19: note = Synthetic Construct
RTYSSLIVYSPYSTEGYDN

SEQ ID NO: 924 - protein, 16 aa, synthetic construct
  REGION 1..16: note = Synthetic Construct
DRDSVLLTSTPLRYDY

SEQ ID NO: 925 - protein, 19 aa, synthetic construct
  REGION 1..19: note = Synthetic Construct
DRSIYQSYYSAQYPNNYEY

SEQ ID NO: 926 - protein, 18 aa, synthetic construct
  REGION 1..18: note = Synthetic Construct
GGNHYDPKKYYIADEYDY

SEQ ID NO: 927 - protein, 15 aa, synthetic construct
  REGION 1..15: note = Synthetic Construct
SDGVIDGTSAPSYRY

SEQ ID NO: 928 - protein, 16 aa, synthetic construct
  REGION 1..16: note = Synthetic Construct
RPGITICLDGTHWPGH

SEQ ID NO: 929 - protein, 18 aa, synthetic construct
  REGION 1..18: note = Synthetic Construct
DRSPLHFALPRSQGQFDY

SEQ ID NO: 930 - protein, 16 aa, synthetic construct
  REGION 1..16: note = Synthetic Construct
DSTVDRLHSAGTDYRY

SEQ ID NO: 931 - protein, 15 aa, synthetic construct
  REGION 1..15: note = Synthetic Construct
LKEVVAGIAPDEYDY

SEQ ID NO: 932 - protein, 13 aa, synthetic construct
  REGION 1..13: note = Synthetic Construct
RSTAAVGYDEFNY

SEQ ID NO: 933 - protein, 19 aa, synthetic construct
  REGION 1..19: note = Synthetic Construct
DTAPKYALHASDQSRDYDY

SEQ ID NO: 934 - protein, 13 aa, synthetic construct
  REGION 1..13: note = Synthetic Construct
TAYSTTYKSVRDY

SEQ ID NO: 935 - protein, 16 aa, synthetic construct
  REGION 1..16: note = Synthetic Construct
DYSSSRAPCGSLRSGI

SEQ ID NO: 936 - protein, 15 aa, synthetic construct
  REGION 1..15: note = Synthetic Construct
SRAIVSGIDANSYDF

SEQ ID NO: 937 - protein, 21 aa, synthetic construct
  REGION 1..21: note = Synthetic Construct
ALGADSQRTVIAGCPIRYFTS

SEQ ID NO: 938 - protein, 19 aa, synthetic construct
  REGION 1..19: note = Synthetic Construct
RQLTYTGNYVPRNDYDYAT

SEQ ID NO: 939 - protein, 20 aa, synthetic construct
  REGION 1..20: note = Synthetic Construct
DWAHTCPAYGSSRYITDFVA

SEQ ID NO: 940 - protein, 17 aa, synthetic construct
  REGION 1..17: note = Synthetic Construct
REEITSYFRTNAGYYNR

SEQ ID NO: 941 - protein, 11 aa, synthetic construct
  REGION 1..11: note = Synthetic Construct
GPLAVATQYTY

SEQ ID NO: 942 - protein, 15 aa, synthetic construct
  REGION 1..15: note = Synthetic Construct
SQTAGLTSNPSLYNY

SEQ ID NO: 943 - protein, 15 aa, synthetic construct
  REGION 1..15: note = Synthetic Construct
SDGVIDGTKANGYRY

SEQ ID NO: 944 - protein, 5 aa, synthetic construct
  REGION 1..5: note = Synthetic Construct
LSYPY

SEQ ID NO: 945 - protein, 14 aa, synthetic construct
  REGION 1..14: note = Synthetic Construct
DSYSIYEKDSSWEY

SEQ ID NO: 946 - protein, 24 aa, synthetic construct
  REGION 1..24: note = Synthetic Construct
ALELRSCSLGLLVPWSEFVPKYEY

SEQ ID NO: 947 - protein, 15 aa, synthetic construct
  REGION 1..15: note = Synthetic Construct
AGGVLLTDTPRRYDY

SEQ ID NO: 948 - protein, 11 aa, synthetic construct
  REGION 1..11: note = Synthetic Construct
NIGDYRRDPYT

SEQ ID NO: 949 - protein, 13 aa, synthetic construct
  REGION 1..13: note = Synthetic Construct
TAYSATYNSVRDY

SEQ ID NO: 950 - protein, 12 aa, synthetic construct
  REGION 1..12: note = Synthetic Construct
RQDCTRSGCDEY

SEQ ID NO: 951 - protein, 11 aa, synthetic construct
  REGION 1..11: note = Synthetic Construct
GRIISTTPRDY

SEQ ID NO: 952 - protein, 18 aa, synthetic construct
  REGION 1..18: note = Synthetic Construct
DRTILYHGISQRTQNYQY

SEQ ID NO: 953 - protein, 12 aa, synthetic construct
  REGION 1..12: note = Synthetic Construct
HAGNTLYRSGHY

SEQ ID NO: 954 - protein, 15 aa, synthetic construct
  REGION 1..15: note = Synthetic Construct
CEFRLSVLCHPGQDY

SEQ ID NO: 955 - protein, 14 aa, synthetic construct
  REGION 1..14: note = Synthetic Construct
RLLTPPPILDLKSF

SEQ ID NO: 956 - protein, 17 aa, synthetic construct
  REGION 1..17: note = Synthetic Construct
REEITSYFRTIASYYNR

SEQ ID NO: 957 - protein, 14 aa, synthetic construct
  REGION 1..14: note = Synthetic Construct
AQGRYGSIWDHYDY

SEQ ID NO: 958 - protein, 17 aa, synthetic construct
  REGION 1..17: note = Synthetic Construct
ARWDYNLHYYRDGDYDY

SEQ ID NO: 959 - protein, 15 aa, synthetic construct
  REGION 1..15: note = Synthetic Construct
CKFRLSVICHAGQDY

SEQ ID NO: 960 - protein, 15 aa, synthetic construct
  REGION 1..15: note = Synthetic Construct
NIGDYRRDPYTGYDP

SEQ ID NO: 961 - protein, 14 aa, synthetic construct
  REGION 1..14: note = Synthetic Construct
DGKGGGRYSYRYDH

SEQ ID NO: 962 - protein, 13 aa, synthetic construct
  REGION 1..13: note = Synthetic Construct
TAYSPTYHSVRDY

SEQ ID NO: 963 - protein, 11 aa, synthetic construct
  REGION 1..11: note = Synthetic Construct
TYRGGDYAVPA

SEQ ID NO: 964 - protein, 16 aa, synthetic construct
  REGION 1..16: note = Synthetic Construct
DVNTDRLHSAGTDYRY

SEQ ID NO: 965 - protein, 18 aa, synthetic construct
  REGION 1..18: note = Synthetic Construct
DQAPLRFAYSLSRDEYDY

SEQ ID NO: 966 - protein, 18 aa, synthetic construct
  REGION 1..18: note = Synthetic Construct
SDRFYSGRYALGPGNMHY

SEQ ID NO: 967 - protein, 11 aa, synthetic construct
  REGION 1..11: note = Synthetic Construct
VDDQMDYWARG

SEQ ID NO: 968 - protein, 12 aa, synthetic construct
  REGION 1..12: note = Synthetic Construct
DVPYELGGRRQY

SEQ ID NO: 969 - protein, 12 aa, synthetic construct
  REGION 1..12: note = Synthetic Construct
YARTTVSGWRHY

SEQ ID NO: 970 - protein, 15 aa, synthetic construct
  REGION 1..15: note = Synthetic Construct
ALYISDPTTVQDYDY

SEQ ID NO: 971 - protein, 16 aa, synthetic construct
  REGION 1..16: note = Synthetic Construct
APSVRDLTTMRTAVFH

SEQ ID NO: 972 - protein, 19 aa, synthetic construct
  REGION 1..19: note = Synthetic Construct
DADPPASYATSEYSRHYDF

SEQ ID NO: 973 - protein, 13 aa, synthetic construct
  REGION 1..13: note = Synthetic Construct
RRIISTTPRDYEY

SEQ ID NO: 974 - protein, 17 aa, synthetic construct
  REGION 1..17: note = Synthetic Construct
RVSTHASGSINERMYPY

SEQ ID NO: 975 - protein, 15 aa, synthetic construct
  REGION 1..15: note = Synthetic Construct
DMRDFNRDAPHEYDY

SEQ ID NO: 976 - protein, 11 aa, synthetic construct
  REGION 1..11: note = Synthetic Construct
QRSCHLPFDPT

SEQ ID NO: 977 - protein, 18 aa, synthetic construct
  REGION 1..18: note = Synthetic Construct
APPTRAAAQLTLPRWYDY

SEQ ID NO: 978 - protein, 18 aa, synthetic construct
  REGION 1..18: note = Synthetic Construct
DQSPLRFALPRSQGQYDY

SEQ ID NO: 979 - protein, 18 aa, synthetic construct
  REGION 1..18: note = Synthetic Construct
DRAPLRFSYSLSRDEYDY

SEQ ID NO: 980 - protein, 11 aa, synthetic construct
  REGION 1..11: note = Synthetic Construct
DQTPLRYAYST

SEQ ID NO: 981 - protein, 19 aa, synthetic construct
  REGION 1..19: note = Synthetic Construct
DADPPASYATSEYSRHYGY

SEQ ID NO: 982 - protein, 13 aa, synthetic construct
  REGION 1..13: note = Synthetic Construct
TQTLATRVSAVDY

SEQ ID NO: 983 - protein, 18 aa, synthetic construct
  REGION 1..18: note = Synthetic Construct
EAYPTYCSDSQYGDRYQF

SEQ ID NO: 984 - protein, 16 aa, synthetic construct
  REGION 1..16: note = Synthetic Construct
DSTLDRLHSAGSDYHY

SEQ ID NO: 985 - protein, 16 aa, synthetic construct
  REGION 1..16: note = Synthetic Construct
RTLYFTAYWQSQRYDQ

SEQ ID NO: 986 - protein, 24 aa, synthetic construct
  REGION 1..24: note = Synthetic Construct
ISHIFAEDAPAMGLCWDQRSAFGY

SEQ ID NO: 987 - protein, 16 aa, synthetic construct
  REGION 1..16: note = Synthetic Construct
DSTLDRLHSAGTDYRD

SEQ ID NO: 988 - protein, 16 aa, synthetic construct
  REGION 1..16: note = Synthetic Construct
QATSGYGPETFRAWNY

SEQ ID NO: 989 - protein, 19 aa, synthetic construct
  REGION 1..19: note = Synthetic Construct
DTDPKYALHATDQSRDYDV

SEQ ID NO: 990 - protein, 18 aa, synthetic construct
  REGION 1..18: note = Synthetic Construct
DLSPLWHGIPTTARQYDS

SEQ ID NO: 991 - protein, 17 aa, synthetic construct
  REGION 1..17: note = Synthetic Construct
RKVDYSSDYVTNYNYDY

SEQ ID NO: 992 - protein, 11 aa, synthetic construct
  REGION 1..11: note = Synthetic Construct
CKFRLSVLCHP

SEQ ID NO: 993 - protein, 15 aa, synthetic construct
  REGION 1..15: note = Synthetic Construct
SDGVIDGTNANSYRY

SEQ ID NO: 994 - protein, 21 aa, synthetic construct
  REGION 1..21: note = Synthetic Construct
VSKLFARDYADWWSGLFSFGY

SEQ ID NO: 995 - protein, 14 aa, synthetic construct
  REGION 1..14: note = Synthetic Construct
NPYYDGNLPQGYSF

SEQ ID NO: 996 - protein, 10 aa, synthetic construct
  REGION 1..10: note = Synthetic Construct
RPTGGESFGS

SEQ ID NO: 997 - protein, 15 aa, synthetic construct
  REGION 1..15: note = Synthetic Construct
PRGYNIGKNPIGYTD

SEQ ID NO: 998 - protein, 19 aa, synthetic construct
  REGION 1..19: note = Synthetic Construct
DSGSSGGVYPSRDLYRYDY

SEQ ID NO: 999 - protein, 21 aa, synthetic construct
  REGION 1..21: note = Synthetic Construct
DPSVYPGIIPTQWARVDLWDY

SEQ ID NO: 1000 - protein, 16 aa, synthetic construct
  REGION 1..16: note = Synthetic Construct
DRFLSESMSDRADHDY

SEQ ID NO: 1001 - protein, 14 aa, synthetic construct
  REGION 1..14: note = Synthetic Construct
VGPGINPPGKPTNY

SEQ ID NO: 1002 - protein, 17 aa, synthetic construct
  REGION 1..17: note = Synthetic Construct
SRTGRYYVFMAVSEYGY

SEQ ID NO: 1003 - protein, 21 aa, synthetic construct
  REGION 1..21: note = Synthetic Construct
DLIEDYKSTYYYSTQPSSYDY

SEQ ID NO: 1004 - protein, 11 aa, synthetic construct
  REGION 1..11: note = Synthetic Construct
DADPPASYATS

SEQ ID NO: 1005 - protein, 18 aa, synthetic construct
  REGION 1..18: note = Synthetic Construct
DRAPLLYGLPRSQGQYDY

SEQ ID NO: 1006 - protein, 20 aa, synthetic construct
  REGION 1..20: note = Synthetic Construct
DWAQTCPAYGSSRYITDFVS

SEQ ID NO: 1007 - protein, 17 aa, synthetic construct
  REGION 1..17: note = Synthetic Construct
DRAPFGIPKVTPGAYDY

SEQ ID NO: 1008 - protein, 15 aa, synthetic construct
  REGION 1..15: note = Synthetic Construct
EHTIVGGGDLRVNEY

SEQ ID NO: 1009 - protein, 15 aa, synthetic construct
  REGION 1..15: note = Synthetic Construct
NIGDYRRDPYTGHDT

SEQ ID NO: 1010 - protein, 9 aa, synthetic construct
  REGION 1..9: note = Synthetic Construct
SLYPSVRDY

SEQ ID NO: 1011 - protein, 14 aa, synthetic construct
  REGION 1..14: note = Synthetic Construct
ETYSIYEKDSSWDY

SEQ ID NO: 1012 - protein, 16 aa, synthetic construct
  REGION 1..16: note = Synthetic Construct
KPRGVGLTDRLSDYEY

SEQ ID NO: 1013 - protein, 11 aa, synthetic construct
  REGION 1..11: note = Synthetic Construct
TAAAGNYEGLG

SEQ ID NO: 1014 - protein, 20 aa, synthetic construct
  REGION 1..20: note = Synthetic Construct
RWTHGLITSAHRMGADDYDY

SEQ ID NO: 1015 - protein, 15 aa, synthetic construct
  REGION 1..15: note = Synthetic Construct
NIGDYRRDPYTGYDY

SEQ ID NO: 1016 - protein, 10 aa, synthetic construct
  REGION 1..10: note = Synthetic Construct
DCGSPTLIPY

SEQ ID NO: 1017 - protein, 18 aa, synthetic construct
  REGION 1..18: note = Synthetic Construct
RSVIQDYIVPGNDFHYEY

SEQ ID NO: 1018 - protein, 8 aa, synthetic construct
  REGION 1..8: note = Synthetic Construct
RDAYLSKY

SEQ ID NO: 1019 - protein, 15 aa, synthetic construct
  REGION 1..15: note = Synthetic Construct
GGGVLLTDTPRRYDY

SEQ ID NO: 1020 - protein, 6 aa, synthetic construct
  REGION 1..6: note = Synthetic Construct
WPSQTY

SEQ ID NO: 1021 - protein, 11 aa, synthetic construct
  REGION 1..11: note = Synthetic Construct
TTRVFNLPRDY

SEQ ID NO: 1022 - protein, 11 aa, synthetic construct
  REGION 1..11: note = Synthetic Construct
DLTVLLTANPG

SEQ ID NO: 1023 - protein, 11 aa, synthetic construct
  REGION 1..11: note = Synthetic Construct
DLTVLLTANPA

SEQ ID NO: 1024 - protein, 10 aa, synthetic construct
  REGION 1..10: note = Synthetic Construct
SRLGGSSYDN

SEQ ID NO: 1025 - protein, 18 aa, synthetic construct
  REGION 1..18: note = Synthetic Construct
DRAILYHGLSQRTQNYAY

SEQ ID NO: 1026 - protein, 14 aa, synthetic construct
  REGION 1..14: note = Synthetic Construct
AKGRYGSIWNDCDY

SEQ ID NO: 1027 - protein, 14 aa, synthetic construct
  REGION 1..14: note = Synthetic Construct
RLLTPPPILDLKEY

SEQ ID NO: 1028 - protein, 15 aa, synthetic construct
  REGION 1..15: note = Synthetic Construct
SIGDYMRDPYTGSDT

SEQ ID NO: 1029 - protein, 20 aa, synthetic construct
  REGION 1..20: note = Synthetic Construct
DWAHTCPAYGSRRYITDFSS

SEQ ID NO: 1030 - protein, 16 aa, synthetic construct
  REGION 1..16: note = Synthetic Construct
DSTLDRLHSAESDYRD

SEQ ID NO: 1031 - protein, 18 aa, synthetic construct
  REGION 1..18: note = Synthetic Construct
DQAPLRFSYSLDRDKYDY

SEQ ID NO: 1032 - protein, 8 aa, synthetic construct
  REGION 1..8: note = Synthetic Construct
IPPDDKNY

SEQ ID NO: 1033 - protein, 8 aa, synthetic construct
  REGION 1..8: note = Synthetic Construct
RDAYGSEY

SEQ ID NO: 1034 - protein, 18 aa, synthetic construct
  REGION 1..18: note = Synthetic Construct
GGNHYDPSKDYIADEYDY

SEQ ID NO: 1035 - protein, 13 aa, synthetic construct
  REGION 1..13: note = Synthetic Construct
TAYSTTYHSVRDY

SEQ ID NO: 1036 - protein, 18 aa, synthetic construct
  REGION 1..18: note = Synthetic Construct
RAVKFGSSWYRISAEYYY

SEQ ID NO: 1037 - protein, 12 aa, synthetic construct
  REGION 1..12: note = Synthetic Construct
RQDCSYDGCDEY

SEQ ID NO: 1038 - protein, 15 aa, synthetic construct
  REGION 1..15: note = Synthetic Construct
NIGDYRHDPYTGYDT

SEQ ID NO: 1039 - protein, 11 aa, synthetic construct
  REGION 1..11: note = Synthetic Construct
VGRIFADTYNL

SEQ ID NO: 1040 - protein, 15 aa, synthetic construct
  REGION 1..15: note = Synthetic Construct
NIGDYSRDPYTGYDT

SEQ ID NO: 1041 - protein, 10 aa, synthetic construct
  REGION 1..10: note = Synthetic Construct
VRQTLTHFTS

SEQ ID NO: 1042 - protein, 14 aa, synthetic construct
  REGION 1..14: note = Synthetic Construct
VGPGLNPRGSPTNY

SEQ ID NO: 1043 - protein, 13 aa, synthetic construct
  REGION 1..13: note = Synthetic Construct
GRLISTTPRDYEY

SEQ ID NO: 1044 - protein, 20 aa, synthetic construct
  REGION 1..20: note = Synthetic Construct
EAYPTYCSDSQYGDRYQFGY

SEQ ID NO: 1045 - protein, 18 aa, synthetic construct
  REGION 1..18: note = Synthetic Construct
DQTPLRYAYSIRSQDYDY

SEQ ID NO: 1046 - protein, 15 aa, synthetic construct
  REGION 1..15: note = Synthetic Construct
RREVLSITRDFPPDY

SEQ ID NO: 1047 - protein, 7 aa, synthetic construct
  REGION 1..7: note = Synthetic Construct
GMVKYDY

SEQ ID NO: 1048 - protein, 11 aa, synthetic construct
  REGION 1..11: note = Synthetic Construct
VLGRPYGSSWL

SEQ ID NO: 1049 - protein, 12 aa, synthetic construct
  REGION 1..12: note = Synthetic Construct
HDGNTAYRSGLY

SEQ ID NO: 1050 - protein, 15 aa, synthetic construct
  REGION 1..15: note = Synthetic Construct
NIGDYRRDPHTGYDT

SEQ ID NO: 1051 - protein, 15 aa, synthetic construct
  REGION 1..15: note = Synthetic Construct
RFAYDISTTTHGYGY

SEQ ID NO: 1052 - protein, 15 aa, synthetic construct
  REGION 1..15: note = Synthetic Construct
CKCRLSVLCQPGQDY

SEQ ID NO: 1053 - protein, 11 aa, synthetic construct
  REGION 1..11: note = Synthetic Construct
SRTAGLTSNRS

SEQ ID NO: 1054 - protein, 18 aa, synthetic construct
  REGION 1..18: note = Synthetic Construct
SPVLLVPQALVRSESYNT

SEQ ID NO: 1055 - protein, 22 aa, synthetic construct
  REGION 1..22: note = Synthetic Construct
DLMRRMMYGKSWWCLNPNDFGS

SEQ ID NO: 1056 - protein, 8 aa, synthetic construct
  REGION 1..8: note = Synthetic Construct
RDAYLSDY

SEQ ID NO: 1057 - protein, 15 aa, synthetic construct
  REGION 1..15: note = Synthetic Construct
CKFGLSLICHPGQDY

SEQ ID NO: 1058 - protein, 129 aa, synthetic construct
  REGION 1..129: note = Synthetic Construct
QVQLVESGGGLVQAGGSLRLSCAVSGRTGNRWPMGWFRQAPGKEREFVATISWSDSRTYYADSVKGRFTISRDNAKNTVFLQMASLKPEDTAVYYCAAAHARVYGANWSSSNRDDYDSWGQGTQVTVSS

SEQ ID NO: 1059 - protein, 129 aa, synthetic construct
  REGION 1..129: note = Synthetic Construct
QVQLVESGGGLVQAGGSLRLSCAVSGRTGSRWPMGWFRQAPGKEREFVATISWSDSRTYYADSVKGRFTIARDNAKNTVFLQMASLKPEDTAVYYCAAAHGRVYGANWSSTNRYDYDSWGQGTQVTVSS

SEQ ID NO: 1060 - protein, 128 aa, synthetic construct
  REGION 1..128: note = Synthetic Construct
QVQLVESGGGLVQAGDSLRLSCAASGRTISTFPMGWFRQAPGKEREFVATITRTGFGTYYSDSVKGRFTISRDNAKNTVFLQMNSLKPEDTALYYCAAAKTTDWVTRAPREMHEYAYWGQGTQVTVSS

SEQ ID NO: 1061 - protein, 124 aa, synthetic construct
  REGION 1..124: note = Synthetic Construct
QVQLVESGGGLVQAGASLRLSCAASGRTFTNSHMGWFRQAPGKERDFVAVISRSGGSTLYADSVKGRFTISRDNAKNTVYLQMNTMKPEDTAVYYCAGARTAGLTSNPSLYDYWGQGTQVTVSS

SEQ ID NO: 1062 - protein, 129 aa, synthetic construct
  REGION 1..129: note = Synthetic Construct
QVQLVESGGGLVQAGGSLRLSCAVSGRTGNRWPMGWFRQAPGKEREFVATISWSDSRTYYADSVKGRFTISRDNAKNTVFLQMASLKPEDTAVYYCAAATARVYGANWSSSNRDDYDSWGQGTQVTVSS

SEQ ID NO: 1063 - protein, 127 aa, synthetic construct
  REGION 1..127: note = Synthetic Construct
QVQLVESGGGLVQAGGSLRLSCAASGRTFSSSAMGWFRQAPGKDREFVAAISPSSTNTGYTDSVKGRFTISRDNTKNTVDLQMNNLKPEDTAIYYCAADANSLRYGYSQNQGRYEYWGQGTQVTVSS

SEQ ID NO: 1064 - protein, 124 aa, synthetic construct
  REGION 1..124: note = Synthetic Construct
QVQLVESGGGLVQPGGSLRLSCVASGLTFSRYTMAWFRQAPGKERVFVAAVSKPGGSTYYADSVKGRFTISRDNAKNTVYLQTSRLNPDDTAVYSCAADLTVLLTANPGHYKYWGQGTQVTVSS

SEQ ID NO: 1065 - protein, 123 aa, synthetic construct
  REGION 1..123: note = Synthetic Construct
QVQLVESGGGLVQPGDSLRLACAASGGTFGYYALGWFRQAPGKEREFVGSITQTGFGTKYADAVKGRFTISRDNAKNTMYLQMNSLKPEDTAVYYCAADPTAQNMGIRDPPYWGQGTQVTVSS

SEQ ID NO: 1066 - protein, 126 aa, synthetic construct
  REGION 1..126: note = Synthetic Construct
QVQLVESGGGLVQAGGSLRVSCAASGRSFSDYAMAWFRQSPGKEREFVAVITSGRSTDYADSVKGRFTISRDNAKNTVYLQMNSLKPEDTAVYYCAADQTPLRFSYSLSRDKYDYWGQGTQVTVSS

SEQ ID NO: 1067 - protein, 126 aa, synthetic construct
  REGION 1..126: note = Synthetic Construct
EVQLVESGGGLVQAGGSLRLSCEASGRTFSSYAMGWFRQAPGKEREFVAAISQGGSTDYGDSTKGRFTISRDNAKNTVYLQMNSLKPEDTAVYYCAADQTPLRYAYSTRSQDYDYWGQGTQVTVSS

SEQ ID NO: 1068 - protein, 126 aa, synthetic construct
  REGION 1..126: note = Synthetic Construct
HVQLVESGGGLVQAGGSLRLSCAASGGTFSAYAMGWFRQVPGKEREFVAGIARSGSDYYGDSVKGRFIISRDNTKNTVYLQMNSLKAEDTGVYYCAADRAILYHGLSQRTQAYAYWGPGTQVTVSS

SEQ ID NO: 1069 - protein, 126 aa, synthetic construct
  REGION 1..126: note = Synthetic Construct
HVQLVESGGGLVQAGDSLRLSCAASGGTFSSYAMGWFRQVPGKEREFVAAISRGGSTDYADSVKGRFTISRDNAKNTVNLQMNSLKPEDTAVYYCAADRSPLFWGMSQSHGEYDYWGQGTQVTVSS

SEQ ID NO: 1070 - protein, 126 aa, synthetic construct
  REGION 1..126: note = Synthetic Construct
DVQLVESGGGLVQAGDSLRLSCTASGLTFSAYGMGWFRQAPGKEREFVAGIARSGSEFYGDSVKGRFTISRDNAKNTVYLQVNSLRPEDTALYYCAADRTILYHAISQRTQNYQYWGPGTQVTVSS

SEQ ID NO: 1071 - protein, 126 aa, synthetic construct
  REGION 1..126: note = Synthetic Construct
HVQLVESGGGLVQAGGSLRLSCAASGHISSRYAMAWFRQGPGKERDFVAGMSSGASTFYAESVKGRFTLSRDNAKNAMYLQMNSLKPEDTAVYYCAADSSPLRYGLSYSSNRYDYWGQGTQVTVSS

SEQ ID NO: 1072 - protein, 125 aa, synthetic construct
  REGION 1..125: note = Synthetic Construct
DVQLVESGGGLVQAGGSLRLSCAASGRTLRSYNMGWFRQPPGKEREFVAALSWTGLGTYYADSVKGRFTISRDITKNTLYLQMDSLQPEDTANYYCAADSTLDRLHSAESDYRYWGQGTQVTVSS

SEQ ID NO: 1073 - protein, 125 aa, synthetic construct
  REGION 1..125: note = Synthetic Construct
DVQLVESGGGLVQAGASLRLSCAASGRTASDYVMGWFRQAAGKEREFVAHISWSGDETNYADSVRGRFIISRDNAENTVYLQMNSLKPEDTAVYYCAAERGYSLMYYRSSEYTYWGQGTQVTVSS

SEQ ID NO: 1074 - protein, 127 aa, synthetic construct
  REGION 1..127: note = Synthetic Construct
QVQLVESGGGLVQAGGSLRLSCTASGRTFSRYAAGWFRQAPGKEREFVAVIEWNGDSAYYTDSAKGRFTISRDNTKNTVYLQMNRLKPEDTAVYICAIGGNHYSPSKYYIADEYDYWGQGTQVTVSS

SEQ ID NO: 1075 - protein, 127 aa, synthetic construct
  REGION 1..127: note = Synthetic Construct
HVQLVESGGGLVQAGGSLRLSCAASGRTFSRYAAGWFRQAPGKEREFVAVIEWDGDSAYYADPVKGRFTISRDNAKNTVYLQMNRLKPEDTAVYICAVGGNHYSRSKYYNLDEYDDWGQGTQVTVSS

SEQ ID NO: 1076 - protein, 126 aa, synthetic construct
  REGION 1..126: note = Synthetic Construct
HVQLVESGGGLVQAGDSLRLSCAASGRTFSSYAMGWFRQAPGKEREFVAAIMWSTGTYYADSVKGRFTISRDNAKNTVYLQMNRLKPEDTAVYICAIGGNHYSRSKYYTADEYDYWGQGTQVTVSS

SEQ ID NO: 1077 - protein, 121 aa, synthetic construct
  REGION 1..121: note = Synthetic Construct
QVQLVESGGGLVQAGGSLRLSCAASRIFSTSAMGWFRQAPGKEREFVAAISWSGTNTHYTDPVKGRFAISTDNAKSTVYLQMNSLKPEDTAVYYCAQGGWGIRQPIEVDYWGKGTQVTVSS

SEQ ID NO: 1078 - protein, 121 aa, synthetic construct
  REGION 1..121: note = Synthetic Construct
QVQLVESGGGLVQAGGSLRLSCAAAARFSTSAMGWFRQAPGKEREFVAAISWSNTNTHYADTVKGRFTISADTAKETVDLQMNSLKPEDTAVYYCVQGGWGIRQPIIVDYWGKGTQVTVSS

SEQ ID NO: 1079 - protein, 124 aa, synthetic construct
  REGION 1..124: note = Synthetic Construct
DVQLVESGGGLVQPGDSLRLSCVASGLTFSRYTMAWFRQAPGKDRIFVAAVSKPGGSTYYADSVKGRFTISRDNAQNTVYLQMNSLKPDDTAVYSCAAGLTVLLTANPAHYNYWGQGTQVTVSS

SEQ ID NO: 1080 - protein, 129 aa, synthetic construct
  REGION 1..129: note = Synthetic Construct
DVQLVESGGGLVQAGGSLRLSCAASGRTFTFNRFAMGWFRQAPEKEREFVAAISRTGRSTEYADSVKGRFAISRDNTKNTVYLQMNSLKPEDTAVYYCAALEAPLLHLIATQRRQYEYWGQGTQVTVSS

SEQ ID NO: 1081 - protein, 126 aa, synthetic construct
  REGION 1..126: note = Synthetic Construct
QVQLVESGGGLVQAGDSLRLSCKYAFDDHNLAWFRQAPGKEREFVAAISWSGARTYYSDSVKGRFTISKDSAKNTMYLQMNRVKAEDTALYYCASRGEPFYFGADDAKKPDNYGIWGQGTQVTVSS

SEQ ID NO: 1082 - protein, 120 aa, synthetic construct
  REGION 1..120: note = Synthetic Construct
HVQLVESGGGLVQAGESLRLLCVASGSIDSINAMGWFRQAPGKQRELVASISNMHTTMYAESVKGRFTISRDNFKNTADLQMNSLKPEDTAIYFCNLRQGCSYNGCDEYWGQGTQVTVSS

SEQ ID NO: 1083 - protein, 126 aa, synthetic construct
  REGION 1..126: note = Synthetic Construct
QVQLVESGGGLVQAGGSLRLSCAVSGRTISTFGMAWFRQAPGKVREFVATITRDEDLTLYADSVKGRFTISRDTAKNTVFLQMNSLKIEDTALYYCAVRRDDSWGYSRQSIEYDYWGQGTQVTVSS

SEQ ID NO: 1084 - protein, 126 aa, synthetic construct
  REGION 1..126: note = Synthetic Construct
QVQLVESGGGLVQAGGSLRLSCAVSGRTISTFGMGWFRQAPGKEREFVATITRDEDMLLYADSVKGRFTISRDTAKNMVFLQMNSLKIEDTALYYCAVRRDSSWGYSRQSTEYDYWGQGTQVTVSS

SEQ ID NO: 1085 - protein, 124 aa, synthetic construct
  REGION 1..124: note = Synthetic Construct
QVQLVESGGGLVQAGGSLRLACAGSGGTFSSYIMAWFHQAPGKEREFIAGISKTGSDTYYADSVKGRFTISRDNAKNTVYLQMNSLKPEDTAVYYCAARRGPLITTSRLHYDFWGQGTQVTVSS

SEQ ID NO: 1086 - protein, 127 aa, synthetic construct
  REGION 1..127: note = Synthetic Construct
QVQLVESGGGLVQAGGSLRLSCAASGRTFSTYAMAWFRQAPGKEREFVAGVARSADTTYYGDSVKGRFTISRDNAKNEVNLQMSSLKPEDTAVYYCAARSVIQYGIVPGNDFHYEYWGQGTQVTVSS

SEQ ID NO: 1087 - protein, 124 aa, synthetic construct
  REGION 1..124: note = Synthetic Construct
QVQLVESGGGLVQAGGSLRLSCVASGRTFSTSHMGWFRQAPGKEREFVAVISRSGSSTLDADSVKGRFTISRDNAKNTVYLQMNSLKPEDTAVYYCAGSRTAGLTSNRFLYDSWGQGTQVTVSS

SEQ ID NO: 1088 - protein, 121 aa, synthetic construct
  REGION 1..121: note = Synthetic Construct
HVQLVESGGGLVQAGDSLRLSCAASRIFSTSAMGWFRQAPGKEREFVAAISWSGGNVHYLDSVKGRFAISADNSKSTVFLQMNSLKPEDTAVYYCAQGGWGIRQVIEVDYWGKGTQVTVSS

SEQ ID NO: 1089 - protein, 121 aa, synthetic construct
  REGION 1..121: note = Synthetic Construct
HVQLVESGGGLVQAGGSLRLSCAAAARFSTSAMGWFRQAPGKEREFVAAVSWSNTNIHYADTVKGRFTISADTAKETVYLQMNSLKPDDTAVYYCAQGGWGLTQPIIVDYWGKGTQVTVSS

SEQ ID NO: 1090 - protein, 129 aa, synthetic construct
  REGION 1..129: note = Synthetic Construct
DVQLVESGGGLVQAGGSLRLSCAASGRTGSRYPMGWFRQAPGKEREFVATISWSDSRTYYADSVKGRFTISRDNAKNTVFLQMASLKPEDTAVYYCAAAHARVYGANWSSSNRYDYDSWGQGTQVTVSS

SEQ ID NO: 1091 - protein, 123 aa, synthetic construct
  REGION 1..123: note = Synthetic Construct
DVQLVESGGGLVQAGDSLRLSCAASGRTFGNYVLDWFRQAPGKEREFVASITQTGFGTYYADAVKGRFTISRDNAKNTMYLQMNSLKPEDTAVYYCAADFTAQNGGIRNPTYWGQGTQVTVSS

SEQ ID NO: 1092 - protein, 123 aa, synthetic construct
  REGION 1..123: note = Synthetic Construct
DVQLVESGGGLVQAGDSLRLSCAASGRTFGNYVLDWFRQAPGKEREFVASITQTGFGTYYADAVKGRFTISRDNAKNTMYLQMNSLKPEDTAVYYCAADFTAQNRGIRIPRYWGQGTQVTVSS

SEQ ID NO: 1093 - protein, 123 aa, synthetic construct
  REGION 1..123: note = Synthetic Construct
DVQLVESGGGLVQAGGSLRLSCAASGRTFGNYVLDWFRQAPGKEREFVASITQTGFGTYYADAVKGRFTISRDNAKNTMYLQMNSLKPEDTAVYYCAADFTVQNGGIRNPTYWGQGTQVTVSS

SEQ ID NO: 1094 - protein, 127 aa, synthetic construct
  REGION 1..127: note = Synthetic Construct
QVQLVESGGGLVQAGGSLRLSCAASGDTFNNYAMGWFRQAPGKEREFVGAISRSGGGTSYLDSVKGRFTISRDNAKNTVYLQMNSLKLEDTAVYYCAADLSALWHGIPTTARQYDSWGQGTQVTVSS

SEQ ID NO: 1095 - protein, 129 aa, synthetic construct
  REGION 1..129: note = Synthetic Construct
HVQLVESGGGLVQAGGSLRLSCAVSGRTGSRYPMGWFRQAPGKERDFVARISWSGGSTYYADSVKGRFTISRDNAKITVVLQMNSLKPEDTGVYYCAADPWGGVRDGPSAAAIRTYDYWGQGTQVTVSS

SEQ ID NO: 1096 - protein, 125 aa, synthetic construct
  REGION 1..125: note = Synthetic Construct
QVQLVESGGGLVQTGGSLRLSCAASGRTFSNYVMGWFRQAPGKEREFVSSIEWNSENTFYANSVKGRFTISRDNAKNTVYLQMNSLKAEDTAVYYCAADRGSSYYYTRASEYTYWGQGTQVTVSS

SEQ ID NO: 1097 - protein, 125 aa, synthetic construct
  REGION 1..125: note = Synthetic Construct
HVQLVESGGGLVQAGASLRLSCAASGRTASNYVMGWFRQAAGKEREFVAHISWSGDETNYADSVRGRFIISRDNAENTVYLQMNSLKPEDTAVYYCAADRGYSLMYYSSREYTYWGQGTQVTVSS

SEQ ID NO: 1098 - protein, 128 aa, synthetic construct
  REGION 1..128: note = Synthetic Construct
HVQLVESGGGLVQAGGSLRLSCAASGRTVSSEFMGWFRQAPGKEREFVAAITWDGGSTYYTDSVKGRFTISRDNAKNTVYLQMNSLKPEDTAVYYCAADRSIFQSYYSAKYPNNYEYWGQGTQVTVSS

SEQ ID NO: 1099 - protein, 126 aa, synthetic construct
  REGION 1..126: note = Synthetic Construct
HVQLVESGGGLAQAGGNLRLSCAASGGTFSDYAMGWFRRPPGKEREFVAAISRGGSTFYADSVKGRFTISRDNAKNTVYLQMTSLKPEDTAVYYCAADRSPLFFGVPRSHGEYDYWGQGTQVTVSS

SEQ ID NO: 1100 - protein, 129 aa, synthetic construct
  REGION 1..129: note = Synthetic Construct
QVQLVESGGGLVQAGGSLRLSCAASGRTFSHYPTGWFRQAPGKEREFVSTISESGTSTYYADSVKGRFTISRDNAKNSVYLQMNSLKPEDTALYYCAADTAGRTQYGSSWSTLDGFVYWGQGTQVTVSS

SEQ ID NO: 1101 - protein, 125 aa, synthetic construct
  REGION 1..125: note = Synthetic Construct
QVQLVESGGGLVQAGGSLRLACAASGRTFSSETMDMGWFRQAPGKEREFVAADSWNDGSTYYADSVKGRFTISRDSAKNTLYLQMNSLKPEDTAVYYCAAETYSIYEKDDSWGYWGQGTQVTVSS

SEQ ID NO: 1102 - protein, 130 aa, synthetic construct
  REGION 1..130: note = Synthetic Construct
QVQLVESGGGLVQAGGSLRLSCAASGFSLDSYSIGWFRQVPGKEREGREGVSCLSRSDGSTDYADSVKGRFTMSRDNAKNTVYLQMDSLKPEDTAVYYCATGEWCSTRARAPVMEGVHHWGQGTQVTVSS

SEQ ID NO: 1103 - protein, 127 aa, synthetic construct
  REGION 1..127: note = Synthetic Construct
DVQLVESGGGLVQAGGSLRLSCAASGRTFSRYAAGWFRQAPGKEREFVAVIEWNGDSAYYADSVKGRFTISRDNAKNTVYLQMNRLKPEDTAVYICAVGGNHYSRSKYYTADEYDYWGQGTQVTVSS

SEQ ID NO: 1104 - protein, 121 aa, synthetic construct
  REGION 1..121: note = Synthetic Construct
HVQLVESGGGLVQAGGSLRLSCAASGSDFSILAIGWYRQAPGKQRELVAAISRVGSTNYADSVKGRFTISRDNAKNTVSLQMNSLKPEDTAVYYCNAGIPMSTVLLGQGFWGQGTQVTVSS

SEQ ID NO: 1105 - protein, 114 aa, synthetic construct
  REGION 1..114: note = Synthetic Construct
QVQLVESGGGLVQAGGSLRLSCAASGSTFNTRNIAWYRQAPGKQRELVAGITNAGATIYADSVKGRFTISRDNAKNTMYLQIDSLKPEDTAVYYCNRIVGTYPWGQGTQVTVSS

SEQ ID NO: 1106 - protein, 127 aa, synthetic construct
  REGION 1..127: note = Synthetic Construct
HVQLVESGGGLVQAGGSLRLSCAASGRTFSRFAAGWFRQAPGKEREFVAVIDWNGGSAYYADSVKGRFTISRDNAKNTVYLQMNRLKPGDTAVYICAIGGNHYDPSRYYTADEYDYWGQGTQVTVSS

SEQ ID NO: 1107 - protein, 129 aa, synthetic construct
  REGION 1..129: note = Synthetic Construct
HVQLVESGGGLVQAGGSLRLSCVVSGRTGSRYPMGWFRQAPGKEREFVATISWSDSRTYYADSVKGRFTISRDNAKNTVFLQMASLKPEDTAIYYCAAAHARVYGANWSSSNRYDYDSWGQGTQVTVSS

SEQ ID NO: 1108 - protein, 127 aa, synthetic construct
  REGION 1..127: note = Synthetic Construct
HVQLVESGGGLVQSGGSLRLSCALSGYTFSIFPTAWFRQAPGKEREFVAGIRWNGGSRDYTEYADFVKGRFTISRDNAKNMVYLQMISLKPEDTALYYCAAADGVIDGTSANAYRYWGQGTQVTVSS

SEQ ID NO: 1109 - protein, 123 aa, synthetic construct
  REGION 1..123: note = Synthetic Construct
DVQLVESGGGLVQAGGSLRLSCAASGSIFSIDTMGWYRQAPGKQRELVAQITSGGTPDYADSVKGRFTISRDSAKNTVSLQMNSLKPEDTAVYYCAAAFRGLPTTDASQYDDWGQGTQVTVSS

SEQ ID NO: 1110 - protein, 127 aa, synthetic construct
  REGION 1..127: note = Synthetic Construct
DVQLVESGGGLVQAGGSLRLSCAASGRTFRGIVMAWFRQAPGKEREIVAANRWSGIDTYYSDSVKGRFTLSRDDGESTLYLQMDSLRPEDTAVYYCAAAGTAFSSIDLTRVSDYTYWGQGTQVTVSS

SEQ ID NO: 1111 - protein, 129 aa, synthetic construct
  REGION 1..129: note = Synthetic Construct
HVQLVESGGGLVQAGESLRLSCVDSKRTGSRWPMGWFRQAPGKEREFVASISWTGSRTYYADSVKGRFTISRDNAENTVFLQMNSLKPEDTAVYYCAAAHARVYGANWSSSNRNDYDAWGQGTQVTVSS

SEQ ID NO: 1112 - protein, 121 aa, synthetic construct
  REGION 1..121: note = Synthetic Construct
HVQLVESGGGFVHAGGSLKLSCTTSRSIKDIQMAWYRQAPGNQREWVAIINADGIVANYWDPVKGRFTISRDNAKNTVYLQMNSLKPEDTAVYYCNAAIREGYSDFFYDYWGQGTQVTVSS

SEQ ID NO: 1113 - protein, 122 aa, synthetic construct
  REGION 1..122: note = Synthetic Construct
QVQLVESGGGLVQAGGSLRLSCAASGPTFSRYGMGWFRQAPGKEREFVAGISWGGTVTYYVDSVKGRFTVSRDNAKNTVFLQMNSLKPEDTAVYYCNAAIREGYSDFFYDYWGQGTQVTVSS

SEQ ID NO: 1114 - protein, 130 aa, synthetic construct
  REGION 1..130: note = Synthetic Construct
EVQLVESGGDLVQPGGSLRLSCAASGFTLDQHVIAWFRQVPGKEREGVSCLNVADGSTFLKYSLKDRFTISGDNAKNTVYLQMNRLKPEDTAIYYCATALRSDGQRTVIAGCPIRYFDSWGQGTQVTVSS

SEQ ID NO: 1115 - protein, 131 aa, synthetic construct
  REGION 1..131: note = Synthetic Construct
HVQLVESGGGLVQPGESLRLSCAASGFDLDYHAIGWFRQAPGKEREGVSGITWRDGRTYYSDSVQGRFTISRDNARNTVYLQMNALKPEDTAVYYCATAPKSSITAAQAMGVMEGRDYHYWGQGTQVTVSS

SEQ ID NO: 1116 - protein, 131 aa, synthetic construct
  REGION 1..131: note = Synthetic Construct
HVQLVESGGGLVQPGGSLRLSCAASGIDLDFHTIGWFRQAPGKEREGVSCISWRDERTYYTDSVTGRFTISRDNVRSTVYLQMNNLKPEDTAVYYCATAPKSSLTAAQAMGVMEGREYAHWGQGTQVTVSS

SEQ ID NO: 1117 - protein, 123 aa, synthetic construct
  REGION 1..123: note = Synthetic Construct
EVQLVESGGGLVQAGGSLRLSCAASGGTFSTYGMAWFRQAPGTEREFVAAIRGGVFRPVYADSVKGRFTISRDNAKNTVYLQMNSLKPEDTAVYYCAAAQGRYGSIWNDYDYWGQGTQVTVSS

SEQ ID NO: 1118 - protein, 129 aa, synthetic construct
  REGION 1..129: note = Synthetic Construct
EVQLVESGGGLVQAGGSLRLSCEDSKRTGSRWPVGWFRQAPGKEREFVASISWTGSRTYYADSVKGRFTISRDNAENTVFLKMNSLKPEDTAVYYCAAAQTRVYGANWSSSNRDDYDAWGQGTQVTVSS

SEQ ID NO: 1119 - protein, 121 aa, synthetic construct
  REGION 1..121: note = Synthetic Construct
DVQLVESGGGLVQAGGSLRLSCATSGTFFRINAMGWYRQAPGKQRELVATITNGGRVNYGDAVKGRFTISGDFTKGTVYLQMNSLKPEDTAVYYCNAAVRRVSVSSALDKWGQGTQVTVSS

SEQ ID NO: 1120 - protein, 126 aa, synthetic construct
  REGION 1..126: note = Synthetic Construct
QVQLVESGGGLVQPGGSLRLSCAASGRAFSTYVVSWYRQAPGKDREYVAGVGRDGDTTYYADSVKGRFAISRDNPKNTVYLQMNNLKPEDTAVYTCAAAWSYAEYVKNSYDDYNVWGQGTQVTVSS

SEQ ID NO: 1121 - protein, 127 aa, synthetic construct
  REGION 1..127: note = Synthetic Construct
QVQLVESGGGLVQAGGSLRLSCAATELNISYYIMGWFRQAPGKEREFVASISPNGIRTAYANSVKGRFTIFRENTKDTISLQMNSLTPEDTAVYYCGAAYTDHVYDLSTTATAFGAWGQGTQVTVSS

SEQ ID NO: 1122 - protein, 128 aa, synthetic construct
  REGION 1..128: note = Synthetic Construct
QVQLVESGGGLVQPGGSLRLSCAASGFTFNRYAMSWVRQAPGKGREWVSGIYSDGSETYYTESVKGRFTISRDNAKNMLYLQMNSLKPEDTALYYCAKDENAHEDYFNSGFDRKYDYWGQGTQVTVSS

SEQ ID NO: 1123 - protein, 127 aa, synthetic construct
  REGION 1..127: note = Synthetic Construct
QVQLVESGGGLVQPGGSLRLSCAASGLTLNDYAIGWFRQAPGKEREGVSCITSADGTTYYADSVKGRFTISRDNALNTVSLQMNSLKPEDTAVYYCATDISPFYCSWPLRTRLVEHWGQGTQVTVSS

SEQ ID NO: 1124 - protein, 127 aa, synthetic construct
  REGION 1..127: note = Synthetic Construct
QVQLVESGGGLVQPGGSLRLSCAASGLILNDRAIGWFRQAPGKEREGVSCITSSDGTTYYADSVKGRFTISRDNAKNTVYLQMNSLKPEDTAVYYCATDISPFYCSWPLRTRLVEYWGQGTQVTVSS

SEQ ID NO: 1125 - protein, 122 aa, synthetic construct
  REGION 1..122: note = Synthetic Construct
QVQLVESGGGLVQPGDSMRLSCVASGLTFSRYTMAWFRQAPGKDRIFVAAVSKPGGSTYYADSVKGRFTISRDNAKNTVYLQMNSLKPEDTAVYYCNADLGYGLGPDRLSSWGQGTQVTVSS

SEQ ID NO: 1126 - protein, 122 aa, synthetic construct
  REGION 1..122: note = Synthetic Construct
HVQLVESGGGLVQAGGSLRLSCAASGRTFTNYAMGWFRQAPGKEREFVAVIRWSGATIYYADSVKGRFTISRDIAKNTVYLQMNSLKPEDTAVYYCNADLGYGLGPDRLSSWGQGTQVTVSS

SEQ ID NO: 1127 - protein, 133 aa, synthetic construct
  REGION 1..133: note = Synthetic Construct
QVQLVESGGGLVQPGGSLRLSCAASGRTLSNYAMGWFRQAPGKEREFVAVIRQRTGMRSYTYYADSVEGRFTISGDGAKMTVSLQMNSLKPEDTAVYYCAIDLIDDYKSTYYYSTQPSSYDYWGQGTQVTVSS

SEQ ID NO: 1128 - protein, 131 aa, synthetic construct
  REGION 1..131: note = Synthetic Construct
HVQLVESGGGSVQPGGSLRLSCAASGLTLDHYAVGWFRQAPGKEREGVSCISSSTGSAYYADSVKGRFTISRDNAKNMMYLEMNSLKPEDTAVYYCATDLLRRMLPGSSWWCLNQNDFGSWGQGTQVTVSS

SEQ ID NO: 1129 - protein, 131 aa, synthetic construct
  REGION 1..131: note = Synthetic Construct
HVQLVESGGGLVHTGGSLRLSCAASGFTLDDYPIGWFRQAPGKEREGVSCISSSDGSAYYSDSVKGRFTISRDNAKNTVYLQMNSLKPEDTAVYYCATDLMRGMFPGKSWWCLNKNDFGSWGQGTQVTVSS

SEQ ID NO: 1130 - protein, 126 aa, synthetic construct
  REGION 1..126: note = Synthetic Construct
QVQLVESGGGLVQAGGSLRLSCLASGRTFGNYAMAWFRQSPGKEREFVAVISRGGSTDYADSVKGRFTISRDNAKNTVYLQMNSLKPEDTAVYYCAADQAPLRFSYSMSRDKYDYWGQGTQVTVSS

SEQ ID NO: 1131 - protein, 161 aa, synthetic construct
  REGION 1..161: note = Synthetic Construct
MAEVQLVESGGRSVQPGASLRLSCAASGQRFSDWSMAWFRQAAGKEREFVAGIDGKDTIEYADSVKDRFFISRDNGRNMVYLQLNNVKPGDTAVYYCTTDRSTVFRNPMLYDYWGQGTQVTVSSEPKTPKPQPQPQPQPQPNPTTESKCPKCPAPELLGGP

SEQ ID NO: 1132 - protein, 126 aa, synthetic construct
  REGION 1..126: note = Synthetic Construct
QVQLVESGGGLVQAGDSLRLSCTASGLTFSAYGMGWFRQAPGKEREFVAGIARSGSEFYGDSVKGRFTISRDNAKNTVYLQVNSLRPEDTALYYCAADRTILYHAISQRTQNYQYLGPGTQVTVSS

SEQ ID NO: 1133 - protein, 126 aa, synthetic construct
  REGION 1..126: note = Synthetic Construct
QVQLVESGGGLVQAGDSLRLSCAASGRTFGNYAMGWFRQAPGTEREFVAAITQGGATDYANSVKGRFIISRDNAKNTVYLQMNSLKPEDTAVYYCAADRTTLRHGYSTRSQNYDYWGQGTQVTVSS

SEQ ID NO: 1134 - protein, 126 aa, synthetic construct
  REGION 1..126: note = Synthetic Construct
QVQLVESGGGLVQAGGSLRLACEASGETLGTYAMGWFRQVPGKEREFVATITRGGATDYANSVKGRFTISRDNAKNTVYLQMNSLKPEDTAVYSCAADRTTLRHSYSTRSQDYDYWGQGTQVTVSS

SEQ ID NO: 1135 - protein, 127 aa, synthetic construct
  REGION 1..127: note = Synthetic Construct
EVQLVESGGGLVQAGGSLRLSCTTSGLTLSRYSMAWFRQAPGKEREFVAAISRDGGRTPYVASAKGRFTISRDDAKGTMYLQMNSLKPEDTAIYYCAADSRVSVELFATSFDAFEYWGQGTQVTVSS

SEQ ID NO: 1136 - protein, 127 aa, synthetic construct
  REGION 1..127: note = Synthetic Construct
EVQLVESGGGLVQAGGSLRLSCTTSGLTLSRYSMAWFRQAPGKEREFVAAISRDGGRTPYVASAKGRFTISRDDAKGTMYLQMNSLKPEDTAIYYCAADSRVSVELFATSFGAFDYWGQGTQVTVSS

SEQ ID NO: 1137 - protein, 127 aa, synthetic construct
  REGION 1..127: note = Synthetic Construct
HVQLVESGGGLVQAGGSLRLSCTTSGLTLSRYSMAWFRQAPGKEREFVAAISRDGGRTPYVASAKGRFTISRDDAKGTMYLQMNSLKPEDTAIYYCAADSRVSVELFVTSFGAFEYWGQGTQVTVSS

SEQ ID NO: 1138 - protein, 125 aa, synthetic construct
  REGION 1..125: note = Synthetic Construct
QVQLVESGGGLVQAGGSLRLSCAASGRTLRSYNMGWFRQPPGKEREFVAALSWTGLGTYYADSVKGRFTISRDITKNTLYLQMDSLQPEDTANYYCAADSTLDRLHSAESDYPYWGRGTQVTVSS

SEQ ID NO: 1139 - protein, 123 aa, synthetic construct
  REGION 1..123: note = Synthetic Construct
HVQLVESGGGLVQAGGSLRLSCAASGRTFSSLAMAWFRQAPGKEREFVARVSAAGSITDYADSVKGRFTIAKDNAKSTVYLRMNSLRLEDTAVYYCAADVATIGSRLANYDYWGQGTQVTVSS

SEQ ID NO: 1140 - protein, 130 aa, synthetic construct
  REGION 1..130: note = Synthetic Construct
DVQLVESGGGLVQAGGSLRLSCAASGFAFSSYAMSWVRQVPGKGREWVAGISPGGGNIYYADSVKGRFSISRDDAGNTLYLQMNNLKPDDTALYRCTKEHARGFGGESNPNPSDLVYGAWGQGTQVTVSS

SEQ ID NO: 1141 - protein, 129 aa, synthetic construct
  REGION 1..129: note = Synthetic Construct
QVQLVESGGGLVQPGGSLRLSCAASGFTLDTYAIGWFRQAPGKEREGVSCISSSDGSTIYADSVKGRFTISRDNAKNTVYLQMNSLKPEDTALYYCGTFSGRSQYYCSDYGSLREFDYWGQGTQVTVSS

SEQ ID NO: 1142 - protein, 117 aa, synthetic construct
  REGION 1..117: note = Synthetic Construct
QVQLVESGGGLVQPGGSLRLSCAASGSSFSTSVMGWYRQAPGKQRDLVATITHEPVAYYADSVKGRFTISRDNAENTVLLQMNSLKPEDTAVYYCYQFSMVDRTTNWGPGTQVTVSS

SEQ ID NO: 1143 - protein, 114 aa, synthetic construct
  REGION 1..114: note = Synthetic Construct
DVQLVESGGGLVQPGGSLRLSCAASGSSFSTSVMGWYRQAPGKQRDLVATITHEPVAYYADSVKGRFTISRDNAENTVLLQMNSLKPEDTAVYYCYQFSMVDRTTNWGPGPRSP

SEQ ID NO: 1144 - protein, 122 aa, synthetic construct
  REGION 1..122: note = Synthetic Construct
HVQLVESGGGLVQPGGSLRLSCVVSGFPFSEYAMSWVRQTPEKGREWVSGIYTDGSETLYENSVKGRFTISRDNTKNTLYLQMNNLKPEDTARYYCKLGDPYGVGLRDYDYWGQGTQVTVSS

SEQ ID NO: 1145 - protein, 122 aa, synthetic construct
  REGION 1..122: note = Synthetic Construct
DVQLVESGGGLVQTGGSLTLSCVASGFPFSEWGMSWVRQRPENGREWIAGVYKDGQETLYDDAVKGRFTIWKDNAKNTVYLQMNNLQPEDTARYYCKLGDPYGVGMRDYKWWGHGTQVTVSS

SEQ ID NO: 1146 - protein, 127 aa, synthetic construct
  REGION 1..127: note = Synthetic Construct
DVQLVESGGGLVQAGESLRLSCAASGRTFRNFAAGWFRQTPGKDREFVAVIEYNGDSAYYADSVKGRFTISRDNAKNTVYLQMNRLKPGDTAVYICAIGGNHYDPSKYYIADEYDYWGQGTQVTVSS

SEQ ID NO: 1147 - protein, 127 aa, synthetic construct
  REGION 1..127: note = Synthetic Construct
QVQLVESGGGLVQAGESLRLSCAASKPTFRNFAAGWFRQTPGKDREFVAVIEYDGDSAYYADSVKGRFTISRDNAKNTVYLQMNRLKPGDTAVYICAIGGNHYDPSKYYTADEYDYWGQGTQVTVSS

SEQ ID NO: 1148 - protein, 127 aa, synthetic construct
  REGION 1..127: note = Synthetic Construct
QVQLVESGGGLVQAGGSLRLSCAASRRTFSNYAAGWFRQAPGKEREFVAVIEWNGESAYYADSVKGRFTISRDNAKNTVYLQMNRLKPEDTAIYICAIGGNHYSRSKYYIADEYDYWGQGTQVTVSS

SEQ ID NO: 1149 - protein, 127 aa, synthetic construct
  REGION 1..127: note = Synthetic Construct
HVQLVESGGGLVQAGGSLRLSCAASGRTFSRYAAGWFRQAPGKEREFVAVIEWDGDSAYYADSVKGRFTISRDNAKNTVYLQMNRLKPEDTAVYICAVGGNHYSRSKYYNLDEYDYWGQGTQVTVSS

SEQ ID NO: 1150 - protein, 127 aa, synthetic construct
  REGION 1..127: note = Synthetic Construct
DVQLVESGGGLVQAGGSLRLSCAASGRTFSRYAAGWFRQAPGKERSFVAVIEWDGDTAYYSDSVKGRFTISRDNAKNTLYLQMNRLKPEDTAVYICAVGGNHYSSSKYYIADEYDYWGQGTQVTVSS

SEQ ID NO: 1151 - protein, 118 aa, synthetic construct
  REGION 1..118: note = Synthetic Construct
QVQLVESGGGLVQAGGSLRLSCAASGSISPISAMGWYRQAPGKQRDIVASISAGGTTYYADSVKGRFTISRDNDWNKVYLQMNSLKPEDTAVYYCTLGGNTYLPRDYWGQGTQVTVSS

SEQ ID NO: 1152 - protein, 118 aa, synthetic construct
  REGION 1..118: note = Synthetic Construct
EVQLVESGGGLVRPGGSLRLSCAASGSISPISAMGWYRQAPGKQRDIVASISAGGTTYYADSVKGRFTISRDNDWNKVYLQMNSLKPEDTAVYYCTLGGNTYLPRDYWGQGTQVTVSS

SEQ ID NO: 1153 - protein, 121 aa, synthetic construct; identical to SEQ ID NO: 1088
  REGION 1..121: note = Synthetic Construct

SEQ ID NO: 1154 - protein, 121 aa, synthetic construct
  REGION 1..121: note = Synthetic Construct
HVQLVESGGGLVQAGDSLRLSCAASRIFSTSAMGWFRQAPGKEREFVAAISWSGTNTHYADPVKGRFAISTDNAKNTVYLQMNSLKPEDTAVYYCAQGGWGLRQPIEVDYWGKGTQVTVSS

SEQ ID NO: 1155 - protein, 121 aa, synthetic construct
  REGION 1..121: note = Synthetic Construct
QVQLVESGGGLVQAGGSLRLSCAAAARFSTSAMGWFRQAPGKEREFVAAVSWSNTNTHYADTVKGRFTISADTAKETVYLQMNSLKPEDTAVYYCAQGGWGLTQPIIVDYWGKGTQVTVSS

SEQ ID NO: 1156 - protein, 121 aa, synthetic construct
  REGION 1..121: note = Synthetic Construct
EVQLVESGGGLVQAGGSLRLSCAASRIFSTSAMGWFRQAPGKEREFVAAISWSGTDTHYANSVKGRFAISTDAAKNTVYLQMNSLEPEDTAVYYCAQGGWGVRQPVEVDYWGKGTQVTVSS

SEQ ID NO: 1157 - protein, 121 aa, synthetic construct
  REGION 1..121: note = Synthetic Construct
HVQLVESGGGLVQAGGSLRLSCAASRIFSTSAMGWFRQAPGKERQFVAGTDWSGTNIHYADSVKGRFAISTDNAKNTVYLQMNSLKPEDTAVYYCAQGGWGVSQPIEVDYWGKGTQVTVSS

SEQ ID NO: 1158 - protein, 117 aa, synthetic construct
  REGION 1..117: note = Synthetic Construct
DVQLVESGGGLVQPGGSLTLSCVASGFRFGGYIMSWVRRAPGQGTEWVSTIGSDGGRISYLDSVKGRFTISRDNAKNTLYLRMDSLKPEDTAVYYCARGHQGIGMDYRGQGTQVTVS

SEQ ID NO: 1159 - protein, 118 aa, synthetic construct
  REGION 1..118: note = Synthetic Construct
DVQLVESGGGLVQPGGSLTLSCVASGFRFGGYIMSWVRRAPGQGTEWVSTIGSDGGRISYLDSVKGRFTISRDNAKNTLYLRMDSLKPEDTAVYYCARGHQGIGMDYRGKGTQVTVSS

SEQ ID NO: 1160 - protein, 123 aa, synthetic construct
  REGION 1..123: note = Synthetic Construct
DVQLVESGGGLVQAGGSLRLSCTASGTINRIYDMDWYRQPPGAQRELVASINYAESTNYGDSVKGRFTISRDDAKNTVYLQMNSLKPEDTAVYYCKMGIGDYMRDPYTATDTWGQGTQVTVSS

SEQ ID NO: 1161 - protein, 121 aa, synthetic construct
  REGION 1..121: note = Synthetic Construct
QVQLVESGGGLVQAGGSLRLSCTASGYDFSILAIAWYRQAPGKERELVAAISRVGSTDYADSVKGRFTISRDNTKNTVSLQMDSLKPEDTAVYYCNAGIPMTTVLSGLGFWGQGTQVTVSS

SEQ ID NO: 1162 - protein, 123 aa, synthetic construct
  REGION 1..123: note = Synthetic Construct
QVQLVESGGGLVQAGGSLRLSCAASGSTLSGNAIGWYRQTPGNERELVGTITATSATDYANSVKGRFTISRDNAKNTVYLQMNSLKPEDTAVYYCNTGKFRLSVLCHPGQDYWGQGTQVTVSS

SEQ ID NO: 1163 - protein, 124 aa, synthetic construct
  REGION 1..124: note = Synthetic Construct
QVQLVESGGGLVQPGGSLRLSCTVSGEPSDDGIGWFRQAPGKERTGVSCFRLSDGSTYYTESAKGRFTISRDNAKNTVYLQMNSLKPEDTAVYYCANGPCTGPRAIAEVLYESWGQGTQVTVSS

SEQ ID NO: 1164 - protein, 132 aa, synthetic construct
  REGION 1..132: note = Synthetic Construct
QVQLVESGGGLVQPGGSLRLSCATSGIDLDFHAIGWFRQAPGKKREGVSCISWRDGRTYYADSVVKGRFTISRDNARNTVYLQMNNLKPEDTAVYYCAAGPKSSLTAAQAMGVMEGRDYVHWGQGTQVTVSS

SEQ ID NO: 1165 - protein, 123 aa, synthetic construct
  REGION 1..123: note = Synthetic Construct
EVQLVESGGGLVQAGGSLRLSCAASGRTFSDDAMAWFRQAPGKEREFVAAISWHPENTFYGDSVKGRFTISRDKTKNTEYLQMDSLKPEDTAVYYCAAGPRLEIGNYAQYEYWGQGTQVTVSS

SEQ ID NO: 1166 - protein, 125 aa, synthetic construct
  REGION 1..125: note = Synthetic Construct
HVQLVESGGGWVQPGGSLRLECTASGGTFTDYAMAWFRQVPGKEREFLTTARADAESFEYTDSARLRFRMYRDNARNTISLQMNRLKPDDTGVYYCAAGRAAIYPSAPLRFYDYWGQGTQVTVSS

SEQ ID NO: 1167 - protein, 125 aa, synthetic construct
  REGION 1..125: note = Synthetic Construct
HVQLVESGGGWVQPGGSLRLECTASGGTFTDYAMAWFRQVPGKEREFLTTARADAESFEYTDSARLRFRMYRDNARNTISLQMNRLKPDDTGVYYCAAGRAAIYPSAPLRFYEYWGQGTQVTVSS

SEQ ID NO: 1168 - protein, 125 aa, synthetic construct
  REGION 1..125: note = Synthetic Construct
DVQLVESGGGWVQPGGSLRLECTASGGTFTDYAMAWFRQVPGKEREFLTTARADAESFEYTDSARLRFRMYRDNARNTISLQMNRLKPDDTGVYYCAAGRAAIYPSAPLRSYDYWGQGTQVTVSS

SEQ ID NO: 1169 - protein, 122 aa, synthetic construct
  REGION 1..122: note = Synthetic Construct
QVQLVESGGGLVQAGGSLRLSCVVSGRTYSDFRVGWFRQAPGKEREFVALISQSGGTTGYADSVKGRFTISRDNAANTVFLQMNSLKPEDTAVYYCAGGRIISTTPRDYDYWGQGTQVTVSS

SEQ ID NO: 1170 - protein, 121 aa, synthetic construct
  REGION 1..121: note = Synthetic Construct
HVQLVESGGGLVQAGGSLRLSCVVSGRTYSDFIVGWFRQAPGKEREFVALISQSGGTTGYADSVKGRFTISRDNAANTVFLQMNSLKPEDTAVYYCAVGRIISTTPRDYEYWARGPRSPSS

SEQ ID NO: 1171 - protein, 122 aa, synthetic construct
  REGION 1..122: note = Synthetic Construct
DVQLVESGGGLVQAGGSLRLSCVVSGRTYSDFIVGWFRQAPGKEREFVALISQSGGTTGYADSVKGRFTISRDNAANTVFLQMNSLKPEDTAVYYCAVGRIISTTPRNYEYWGQGTQVTVSS

SEQ ID NO: 1172 - protein, 120 aa, synthetic construct
  REGION 1..120: note = Synthetic Construct
DVQLVESGGGLVQAGGSLRLSCAASGGSLSSYGMGWFRQAPGAEREFVAAVGRSRVEYYTDSVKGRFIISRDNAKNTMFLQMNSLKPEDTAVYYCAAGSGTFPRYEYDYWGQGTQVTVSS

SEQ ID NO: 1173 - protein, 122 aa, synthetic construct
  REGION 1..122: note = Synthetic Construct
QVQLVESGGGLVQPGGSITLTCVASGDFISLSAVGWYRQTPGNQRELVAAITNGGTPSYADFVRGRFTISGNFHQNTVWLQMDNLNPEDTAVYYCTSGTSYMGSYHPSAGAWGQGTQVTVSS

SEQ ID NO: 1174 - protein, 127 aa, synthetic construct
  REGION 1..127: note = Synthetic Construct
QVQLVESGGGLVQTGGSLKLSCAASGLISGYTLKHYATAWFRQAPGKEREGIAAINSDGSALYGEVVKGRFTVSIDDTKNVMYLQMNDLKPEDTALYYCASGTTFGWGLRKLGYDDWGQGTQVTVSS

SEQ ID NO: 1175 - protein, 121 aa, synthetic construct
  REGION 1..121: note = Synthetic Construct
HVQLVESGGGLVEAGGSLSLSCVATEDTLSNHHMGWFRQAPGKQREFVGGIHRRDGSTNYADSVKGRFSVTRDNAKNTVYLHMNNLKPEDTAVYYCATGVGTLSPFTAASWGQGTQVTVSS

SEQ ID NO: 1176 - protein, 125 aa, synthetic construct
  REGION 1..125: note = Synthetic Construct
HVQLVESGGGLVQPGGSVRLSCRASGSIRNDYTMAWLRQAAEKEREFVAAIRWTEGITYYRNSVKGRFIISKDNDKNTWYLQMNNLTPEDTAVYYCASGYLYGTSPHAPYAYNYFGQGTQVTVSS

SEQ ID NO: 1177 - protein, 124 aa, synthetic construct
  REGION 1..124: note = Synthetic Construct
HVQLVESGGGLVQPGASLRLSCVTSESAGSINAIGWYRQAPGKERELVASVSGGGTAYYVDAVKGRFTISRTISTDNRKTTVDLQMNNLKPEDTAVYYCNIHDGNTAYRSGRYWGQGTQVTVSS

SEQ ID NO: 1178 - protein, 121 aa, synthetic construct
  REGION 1..121: note = Synthetic Construct
QVQLVESGGGLVQAGGSLRLSCAASGPTFSRYGMGWFRQAPGKEREFVAGISWGGTVTYYVDSVKGRFTVSRDNAKNTLYLQMNSLKPEDTAMYYCARHILGTTASGRDLWGQGTQVTVSS

SEQ ID NO: 1179 - protein, 127 aa, synthetic construct
  REGION 1..127: note = Synthetic Construct
HVQLVESGGGLVQTGDSLSLSCAASGSTYKRYPMGWFRQAPGKEREFVAAINWSGDKIFYSDSVKGRFTIARDNAKNTVYLQINNLKPEDTAAYYCAAHSAPYTDYLPQQENEYAYWGQGTQVTVSS

SEQ ID NO: 1180 - protein, 114 aa, synthetic construct
  REGION 1..114: note = Synthetic Construct
DVQLVESGGGLVQAGGSLRLSCVVSGRTYSDFIVGWFRQAPGKEREFVALISQSGGTTGYADSVKGRFTISRDNAKNTVYLQMDGLKPEDTAVYYCRIIGTNFWGQGTQVTVSS

SEQ ID NO: 1181 - protein, 111 aa, synthetic construct
  REGION 1..111: note = Synthetic Construct
DVQLVESGGGLVQAGGSLRLSCTIPETTSGYIGWYRQAPGKQRELVAHENFGSGTKYADSVKGRFTISRHNAKNTVYLQMDGLKPEDTAVYYCRIIGTNFWGQGTQVTVSS

SEQ ID NO: 1182 - protein, 127 aa, synthetic construct
  REGION 1..127: note = Synthetic Construct
HVQLVESGGGLVPPGGSLRLSCTASGFSLDYRAVGWFRQAPGKEREGISCISSGDSFIYYADSVKGRFTISRDNAKNTVYLQMNSLKPEDTGVYYCAAIRGPSDDDCPDDRASGNYWGQGTQVTVSS

SEQ ID NO: 1183 - protein, 123 aa, synthetic construct
  REGION 1..123: note = Synthetic Construct
DVQLVESGGGLVQAGGSLRLSCAASGRTFSSYTMGWFRQAPGKEREFVAAISWIGGSTFYTGSVKGRFTISRDNAKNTVYLQMNRLKPEDTAVYSCAAKDSTNVVIAWDYAYWGQGTQVTVSS

SEQ ID NO: 1184 - protein, 122 aa, synthetic construct
  REGION 1..122: note = Synthetic Construct
DVQLVESGGGLVRPGGSLRLSCAASGNVYSINTMAWHRQVPGKQRELVASITRAGHSEYVDSVKGRFTVSRDNTKNTMSLEINKAFPEDTAVYYCLMKILINGPGLREYDYWGQGTQVTVSS

SEQ ID NO: 1185 - protein, 125 aa, synthetic construct
  REGION 1..125: note = Synthetic Construct
EVQLVESGGGLVQAGDSLRLSCVASGRTFTTSIMGWFRQAPGKEREFVAAIARNGVSTFYADSVKGRFTASRDNAKNTLYLQMNSLKPEDTGVYYCAAKPRGVGLTDRISDYDYWGQGTQVTVSS

SEQ ID NO: 1186 - protein, 126 aa, synthetic construct
  REGION 1..126: note = Synthetic Construct
DVQLVESGGGSVQAGGSLRLSCAISGLTGTNYAMAWFRQAPGKEREFVARIPRDGDSTAYADSVKGRFTISRDNAKNMGYLQLSSLKPEDTAVYFCAVKQGPLYPYIYLSRGYDRWGRGTQVTVSS

SEQ ID NO: 1187 - protein, 124 aa, synthetic construct
  REGION 1..124: note = Synthetic Construct
EVQLVESGGDLVQPGGSLRLSCAASGFSLSDYPIGWFRQAPGKVREGISCISSHGESTDYSDSVKGRFTISKDRTKNTVYLQMNSLKPGDTAVYYCATLLRCDVSWPVSRFHSWGQGTQVTVSS

SEQ ID NO: 1188 - protein, 135 aa, synthetic construct
  REGION 1..135: note = Synthetic Construct
QVQLVESGGGLVQPGGSLRLSCAASQFTADHYAIGWLRQAPGQEREGVAAISVSDGDPYHRAGDTYYAMSVKGRFTISRDNARNMVYLQMNRLKPEDTAAYYCGTLTHAAYLTAKSADIMNLGVWGQGTQVTVSS

SEQ ID NO: 1189 - protein, 125 aa, synthetic construct
  REGION 1..125: note = Synthetic Construct
QVQLVESGGGLVQAGGSLKLSCAASGRTFSDYTIGWFRRTPGKEREFVAAISGSTESILYADSVKGRFTISRDNSQNTVYLQIHSLKPEDTAVYYCASPFTTMWPGALAKNYDYWGQGTQVTVSS

SEQ ID NO: 1190 - protein, 125 aa, synthetic construct
  REGION 1..125: note = Synthetic Construct
QVQLVESGGGLVQPGDSMRLSCVASGLTFSRYTMAWFRQAPGKDRIFVAAVSKPGGSTYYADSVKGRFTISRDNAQNTVYLQMNSLIQEDTAVYYCATPSEPYYRDRGASDYEYWGRGTQVTVSS

SEQ ID NO: 1191 - protein, 129 aa, synthetic construct
  REGION 1..129: note = Synthetic Construct
DVQLVESGGGFVQAGGSLRLSCADSGLTRSVWPMGWFRQAPGKEREFVAGIAWSGERQSYADFVKGRFTVSRDNARNTVYLQMNSLKPEDTAVYYCAAPTSGVFGRTYAPTATSSYDSWGQGTQVTVSS

SEQ ID NO: 1192 - protein, 123 aa, synthetic construct
  REGION 1..123: note = Synthetic Construct
QVQLVESGGGLVQPGGSLRLSCEPSESIFSINAMNWYRQAAGKERELVAQITPGDPGDNFWYLESVKGRFTISRAGAKDTLYLEMKSLKPEDTGVYYCNVRAGTYLSGLKNYWGQGTQVTVSS

SEQ ID NO: 1193 - protein, 127 aa, synthetic construct
  REGION 1..127: note = Synthetic Construct
DVQLVESGGGLVKTGDSLRLSCAVSGGTFGSYGMAWFRQAPGKEREIVASIGRTGRTTDYADSVKGRFSIARDNAKNTVYLQMNNLKPEDTAVYYCAARIFSLNYALIGRDTNINYWGQGTQVTVSS

SEQ ID NO: 1194 - protein, 120 aa, synthetic construct
  REGION 1..120: note = Synthetic Construct
HVQLVESGGGLVQAGESLRLSCVASGSISSINAMGWFRQAPGKQRELVASISNIHTTLYAESVKGRFTISRDTAKNTADLQMDSLKPEDTAIYYCNLRQDCSYNGCDEYWGQGTQVTVSS

SEQ ID NO: 1195 - protein, 125 aa, synthetic construct
  REGION 1..125: note = Synthetic Construct
QVQLVESGGGLVQAGGSLRLSCVASGRTWSMNAMGWFRQAPGKEREFVAAMYWMAGGPYYADSVKGRFTISRDNAKNTLYLQMNNLEPEDTAIYYCAARQESYNTIFLTRSYDSWGQGTQVTVSS

SEQ ID NO: 1196 - protein, 120 aa, synthetic construct
  REGION 1..120: note = Synthetic Construct
QVQLVESGGGLVQAGGSLRLLCVASGSIDSINAMGWFRQAPGKQRELVASISNMHTTMYAESVKGRFTISRDNAKNTADLQMNSLKPEDTAIYFCNLRQRCSYNGCDEYWGQGTQVTVSS

SEQ ID NO: 1197 - protein, 125 aa, synthetic construct
  REGION 1..125: note = Synthetic Construct
DVQLVESGGGLVQAGASLRLSCVVSGVTFSTYGMAWFRQAPEKQRTFVATITREDTTFYADSVKGRFTISRDNAKNTVYLQMNSLKLEDTAVYYCAVRRDSSWGYSRDLFEYDDWGQGTQVTVSS

SEQ ID NO: 1198 - protein, 126 aa, synthetic construct
  REGION 1..126: note = Synthetic Construct
DVQLVESGGGLVQAGGSLRLSCLVSGLTFSTYGMGWFRQAPGKEREFVAQITRSGSPTLYADSVKGRFTISRDNAKNTMYLQMNSLKIEDTAVYYCAVRRDSSWGYSRDSFEYDYWGQGTQVTVSS

SEQ ID NO: 1199 - protein, 123 aa, synthetic construct
  REGION 1..123: note = Synthetic Construct
QVQLVESGGGLVQAGGSLRLSCVASGRIYDTPNIGWFREAPGKEREDVSCISSPDDSTYYSDSVKGRFTTSRDNAKNTVYLQLNNLKTEDTAVYYCAIRRSCHLPFNPTHDWWGQGTQVTVSS

SEQ ID NO: 1200 - protein, 124 aa, synthetic construct
  REGION 1..124: note = Synthetic Construct
QVQLVESGGGLVQTGGSLRLSCAASGRTFSTYTMGWFRQAPGKEREFVAAITPTGYGTKSADSVKGRFIISRDNPKNTVYLQMNNLKPEDTAVYYCAARSGTITNQDQYDFHYWGQGTQVTVSS

SEQ ID NO: 1201 - protein, 119 aa, synthetic construct
  REGION 1..119: note = Synthetic Construct
QVQLVESGGGSVQPGDSLRLSCAASGFTFSTHDMGWFRQTPRKGQELVASIIWNGGHSEYADSVKGRFFISRDNSKNMAYLQMNSLKPEDTAKYYCAARSTFSGSYDYWGRGTQVTVSS

SEQ ID NO: 1202 - protein, 121 aa, synthetic construct
  REGION 1..121: note = Synthetic Construct
QVQLVESGGGLVQAGGSLRLSCAASGSIFSINAMGWYRQAPGKQRELVAAITSGGSTNYADSVKGRFTISRDNAKNTVYLQMNSLKPEDTAIYYCAARSTPAVGSDQFLYWGQGTQVTVSS

SEQ ID NO: 1203 - protein, 127 aa, synthetic construct
  REGION 1..127: note = Synthetic Construct
HVQLVESGGGLVQTGASLRLSCKASGRTFSTYTISWFRQAPGKEREFVGGVATSGGTTYYGDSVQGRFTISRDNAKNEVYLQMNSVKPEDTAVYICAARSVIQDTVVISNPIHFEYWGQGTQVTVSS

SEQ ID NO: 1204 - protein, 127 aa, synthetic construct
  REGION 1..127: note = Synthetic Construct
QVQLVESGGGLVQAGGSLRLSCAASGRTFSTYAMAWFRQAPGKEREFVAGVARSADTTYYGDSVKGRFTISRDNAKNEVNLQMSSLKPEDTAVYYCAARSVIQYSIVPGNDFHYEYWGQGTQVTVSS

SEQ ID NO: 1205 - protein, 127 aa, synthetic construct
  REGION 1..127: note = Synthetic Construct
EVQLVESGGRLVQAGGSLRLSCAASGRTFSTYTMAWFRQAPGKEREFVAGIARNGDTAYYSDSVKGRFTISRDNAKNEVSLQMNSLKPEDTAVYTCAARSVVQLEVVLNNPIHFEYWGQGTQVTVSS

SEQ ID NO: 1206 - protein, 118 aa, synthetic construct
  REGION 1..118: note = Synthetic Construct
HVQLVESGGGLVQAGGSLRLSCAASGRTASSYAIGWFRQAPGKEREFVARISWSSGSTNYADSVKGRFTISRDNAKNTVYLQMNSLKPEDTADYYCATRTAAGVYDYWGRGTQVTVSS

SEQ ID NO: 1207 - protein, 123 aa, synthetic construct
  REGION 1..123: note = Synthetic Construct
QVQLVESGGGKVQPGGSLRLSCIVSGFRMDDYAAGWFRQAPGKEREKLGCILNKDGSTVYADSVKGRFTISRDNAKNKLYLEIDSLKPEDTGVYYCALRTDWGTTCLGRFEYYGQGTQVTVSS

SEQ ID NO: 1208 - protein, 120 aa, synthetic construct
  REGION 1..120: note = Synthetic Construct
HVQLVESGGGLVQAGGSLRLSCAASGTISTLNAMGWYRQAPGKQRELLASISNLGTTYHADSVAGRFTISRGSAKNTVNLQMNSLKPDDTAVYYCNTRVLEGGTQIRDYWGQGTQVTVSS

SEQ ID NO: 1209 - protein, 119 aa, synthetic construct
  REGION 1..119: note = Synthetic Construct
QVQLVESGGGLVQAGGSLRLSCVASGTISTLNAMGWYRQAPGKQRELLTSISNLGTTYSADSVKGRFTISRGNAKNTVYLQMDSLKPDDTAVYYCNTRVLEGTEYRDYWGQGTQVTVSS

SEQ ID NO: 1210 - protein, 127 aa, synthetic construct
  REGION 1..127: note = Synthetic Construct
HVQLVESGGGLVQTGGSLRLSCAFSGYTFSTFPTAWFRQAPGKEREFVAGIRWNGGSRDYTEYADFVKGRFTISRDNAKNMIYLQMISLKPEDTALYYCAASDGIIDGTSGNSYRYWGQGTQVTVSS

SEQ ID NO: 1211 - protein, 127 aa, synthetic construct
  REGION 1..127: note = Synthetic Construct
EVQLVESGGGLVQTGGSLRLSCALSGYTFSIFPTAWFRQAPGKEREFVAGIRWNGSTRDYTEYADFVKGRFTISRDNAKNMVYLQMISLKPEDTALYYCAASDGVIDGTNANAYRYWGQGTQVTVSS

SEQ ID NO: 1212 - protein, 127 aa, synthetic construct
  REGION 1..127: note = Synthetic Construct
QVQLVESGGGLVQTGGSLRLSCAVSGYTFSIFPLAWFRQAPGKEREFVAGIRWNGHSRDYEEYADFAKGRFTISRDNAKNMVYLQMISLKPEDTALYYCAASDGVIDGTNANGYRYWGQGTQVTVSS

SEQ ID NO: 1213 - protein, 127 aa, synthetic construct
  REGION 1..127: note = Synthetic Construct
EVQLVESGGDLVQTGGSLRLSCAVSGYTFSIFPLAWFRQAPGKEREFVAGIRWNGHSRDYEEYADFAKGRFTISRDNAKNMVYLQMISLKPEDTALYYCAASDGVIDGTSAVSYRYWGQGTQVTVSS

SEQ ID NO: 1214 - protein, 124 aa, synthetic construct
  REGION 1..124: note = Synthetic Construct
QVQLVESGGGLVQAGDSLRLSCTASGDRFSVYMIGWFRQAPGKERDFIGSIVRNGSAVYGDSVKGRFTISRDNAKKTVFLQMNSLKADDTGVYYCARSVFSNVWSQRSRDYISWGPGTQVTVSS

SEQ ID NO: 1215 - protein, 125 aa, synthetic construct
  REGION 1..125: note = Synthetic Construct
HVQLVESGGGLVQAGGSLRLSCAASGFIFSTYAMSWVRQAPGKGREWVAGIQREGTETNYADSVKGRFTISRDNVKNTLYLQMNNLKPEDTALYYCAKVLGRPYGRTWLDDIDARGKGTQVTVSS

SEQ ID NO: 1216 - protein, 118 aa, synthetic construct
  REGION 1..118: note = Synthetic Construct
QVQLVESGGGLVQAGGSLRLSCAASGNFFSINFMAWYRQAPGKQRELVAGITGDGIANYSDSVAGRFTISRDNAKNTVYLQMNSLKPEDTAVYYCNAVRSTLTHFTSWGQGTQVTVSS

SEQ ID NO: 1217 - protein, 128 aa, synthetic construct
  REGION 1..128: note = Synthetic Construct
DVQLVESGGGLVQAGGSLRLSCVVSGGTFSSLAMAWFRQAPGKDREFVAGISWSGRSTDYEDAVKGRVAISRDNARNTVYLQMSSLKREDTAVYYCAAVVRDYSRDYVTNMDFQYDYWGQGTQVTVSS

SEQ ID NO: 1218 - protein, 124 aa, synthetic construct
  REGION 1..124: note = Synthetic Construct
QVQLVESGGGFVQPGGSLRLSCTTSGFRLDHYAIGWFRQAPGKEREGISWIFYNDATTYYTDSVKGRFTASRDNYKNTVYLQMDSLKPEDTAVYYCARWQSGNSWSREEGYDYWGQGTQVTVSS

SEQ ID NO: 1219 - protein, 123 aa, synthetic construct
  REGION 1..123: note = Synthetic Construct
HVQLVESGGGLVQAGGSLRLSCAASGSTFSGNAIGWYRQTPGKQRELVATITATSATDYENSVKGRFTISRDNAKNTVYLQMNSLKPEDTAVYYCNTYKFRLSLICHPGQDYWGQGTQVTVSS

SEQ ID NO: 1220 - protein, 126 aa, synthetic construct
  REGION 1..126: note = Synthetic Construct
QVQLVESGGGLVQAGDSLRLSCTASGRTFSAYGMGWFRQAPGKEREFVAGIARSGSEYYGDSVKGRFTISRDNAKNTVYLQMASLKAEDTGVYYCAADPTILYHAISQRTQNYRHWGPGTQVTVSS

SEQ ID NO: 1221 - protein, 126 aa, synthetic construct
  REGION 1..126: note = Synthetic Construct
HVQLVESGGGLVQAGDSLRLSCTASGRTFSAYGMGWFRQAPGKEREFVAGIARSGSEYYGDSVKGRFTISRDNAKNTVYLQMASLKAEDTGVYYCAADPTILYHAISQRTQNYRYWGPGTQVTVSS

SEQ ID NO: 1222 - protein, 126 aa, synthetic construct
  REGION 1..126: note = Synthetic Construct
DVQLVESGGGLVQAGGSLRLSCAASGRTFSSYTMGWFRQAPGKEREFVAVISSGRSTDYADSVKGRFTISRDNAKNTVYLQMNSLKPEDTAVYYCAADQAPLRFSYSLSRDEYDYWGQGTQVTVSS

SEQ ID NO: 1223 - protein, 126 aa, synthetic construct
  REGION 1..126: note = Synthetic Construct
QVQLVESGGGLVQPGGSLRLSCAASGSIFSANVMGWYRQTPGKQRELVASITNTGTAYYTDSVKGRFAISRDNAKNTVYLQMTSLKPEDTAVYYCAADRAPYRFGVSQRTQRYDYWGQGTQVTVSS

SEQ ID NO: 1224 - protein, 130 aa, synthetic construct
  REGION 1..130: note = Synthetic Construct
DVQLVESGGGLVQAGGSLRLTCAASGGTFSTSTMDMGWFRQAPGKEREFVAVDSWNDGRAYYADSVKGRFTISRDNAKNTVYLQMNSLKPEDTAVYYCAADRSIFQSYYSAKYPNNYEYWGQGTQVTVSS

SEQ ID NO: 1225 - protein, 126 aa, synthetic construct
  REGION 1..126: note = Synthetic Construct
DVQLVESGGGLVQAGDSLRLSYTASGRTFSAYGMGWFRQAPGKEREFVAGIARSGSEYYGDSVKGRFTISRDNAKNTVYLQVNSLKAEDTGLYYCAADRTILYHAISQRTQNYQYWGPGTQVTVSS

SEQ ID NO: 1226 - protein, 126 aa, synthetic construct
  REGION 1..126: note = Synthetic Construct
DVQLVESGGGLVQAGGSLRLSCTASGRTFSAYGMGWFRQVPGKEREFVAGIARSGSEYYGDSVKGRFTISRDNVKNTVYLQMNSLKAEDTGVYYCAADRTILYHGLSQRTQDYRYWGPGTQVTVSS

SEQ ID NO: 1227 - protein, 126 aa, synthetic construct
  REGION 1..126: note = Synthetic Construct
HVQLVESGGGLVQAGDSLRLSCTASGRTFSAYGMGWFRQAPGKEREFVAGIARSGSEYYGDSVKGRFTISRDNAKNTVYLQVNSLKAEDTGLYYCAADRTTLYHAISQRTQNYQYWGPGTQVTVSS

SEQ ID NO: 1228 - protein, 125 aa, synthetic construct
  REGION 1..125: note = Synthetic Construct
HVQLVESGGGLVQAGGSLRLSCAASGRTLRSYNMGWFRQAPGKEREFVAAISWTGVGTYYGDSVKGRFTISRDNTKNTLYLQMDSLKPEDTAIYYCAADSTTDRLHSAESDYPYWGQGTQVTVSS

SEQ ID NO: 1229 - protein, 125 aa, synthetic construct
  REGION 1..125: note = Synthetic Construct
QVQLVESGGGLVQAGGSLRLSCAASGDTLRSYNMGWFRQAPGKEREFVAVISWTGVGTYYGDSVKGRFTISRDVIKNTLYLQMDSLKPEDTAIYYCAADSTTYRLHSAGSDYLYWGQGTQVTVSS

SEQ ID NO: 1230 - protein, 129 aa, synthetic construct
  REGION 1..129: note = Synthetic Construct
HVQLVESGGGLAQSGDSLRLSCAASGRTFDINYMAWFRRAPGKEREFVCTTKWRGEDTYCDGSVQGRFTISRDNAKNSVYLQMNSLKPEDTALYYCAADTAGRTQYGSSWSTLDDYVYWGQGTQVTVSS

SEQ ID NO: 1231 - protein, 128 aa, synthetic construct
  REGION 1..128: note = Synthetic Construct
HVQLVESGGGLVQAGGSLRLSCAASGGAFSRYDMGWFRQAPGKEREFVIAIARNGAKTYASDSVKGRFTISRDNAKNTVLLQMNSLKPEDTAVYYCAADTAPKYALHASDQPRDYDYWGRGTQVTVSS

SEQ ID NO: 1232 - protein, 130 aa, synthetic construct
  REGION 1..130: note = Synthetic Construct
HVQLVESGGGLVQAGGSLRLTCAASGGTFSTSTMDMGWFRQAPGKEREFVAVDSWNDGRAYYADSVKGRFTISRDSAKTTLYLQMNSLKPEDTAVYYCAADTAPKYALHASDQPRDYDYWGRGTQVTVSS

SEQ ID NO: 1233 - protein, 125 aa, synthetic construct
  REGION 1..125: note = Synthetic Construct
HVQLVESGGGLVQAGGSLRLTCAASGGTFSTSTMDMGWFRQAAGKEREFVALDSWNGGRTYYADSVKGRFTISRDNAKNTLYLQMNSLKVEDTAVYYCAADTYSNYEKDYSWGYWGQGTQVTVSS

SEQ ID NO: 1234 - protein, 125 aa, synthetic construct
  REGION 1..125: note = Synthetic Construct
DVQLVESGGGLVQAGGSLRLTCAASGRTFSSDTMDMGWFRQAPGKERQFVAADAWNDGRTYYADSVKGRFTISRDNAKNTLYLQMNSLKPEDTAVYYCAADTYSNYEKDYSWGYWGQGTQVTVSS

SEQ ID NO: 1235 - protein, 123 aa, synthetic construct
  REGION 1..123: note = Synthetic Construct
HVQLVESGGGLVQAGGSLRLSCAASGSTASINAIGWYRQAPGKEREFVAVDSWNDGRAYYADSVKGRFTISRDSAKTTLYLQMNSLKPEDTAVYYCAAETYSNYEKDYSWGYWGQGTQVTVSS

SEQ ID NO: 1236 - protein, 117 aa, synthetic construct
  REGION 1..117: note = Synthetic Construct
QVQLVESGGGLVQTGGSLRLSCTTSGFIFSLNAMTWYRQAPGKQRELVAGVSRDGNTKYANFVKGRFTISRDDAKSTIYLQMNSLKPEDTAVYYCNAGFVRPVFDNWGQGTQVTVSS

SEQ ID NO: 1237 - protein, 127 aa, synthetic construct
  REGION 1..127: note = Synthetic Construct
HVQLVESGGGLVQAGGSLRLSCAASGRTFSRYAAGWFRQAPGKEREFVAVIEWDGDNAYYADSVKGRFTISRDNAKNTVYLQMNRLKPEDTAVYICAVGGNHYSPNKYYTADEYDYWGQGTQVTVSS

SEQ ID NO: 1238 - protein, 127 aa, synthetic construct
  REGION 1..127: note = Synthetic Construct
DVQLVESGGGLVQAGGSLRLSCAASGRTFSSYTMGWFRQAPGKEREYVGAISQNGGSTYYADSVKGRFTISRDNAKNTLYLQMSRLKPEDTAVYICAVGGNHYSRSKYYIADEYDYWGQGTQVTVSS

SEQ ID NO: 1239 - protein, 126 aa, synthetic construct
  REGION 1..126: note = Synthetic Construct
HVQLVESGGGLVQAGGSLRLSCAVSGSTLGINAIGWYRQPPGKQRELVASISSLGTTLYAESVKGRFTISRDNAKNTVYLQMNRLKPEDTAVYICAVGGNHYSRSKYYTADEYDYWGQGTQVTVSS

SEQ ID NO: 1240 - protein, 121 aa, synthetic construct
  REGION 1..121: note = Synthetic Construct
HVQLVESGGGLVQAGGSLRLSCAASRIFSTSAMGWFRQAPGKEREFVAAISWSGTNTHYADSVKGRFAISTDNAKNTVYLQMNSLKPEDTAVYYCAQGGWGISQPIEVDYWGKGTQVTVSS

SEQ ID NO: 1241 - protein, 121 aa, synthetic construct
  REGION 1..121: note = Synthetic Construct
HVQLVESGGGLVQAGGSLRLSCAADARFSTSAMGWFRQAPGKEREFVAAISWSGANTHYADTVKGRFTISTDTAKNTVYLQMNSLKPEDTAVYYCAQGGWGITQPISVDYWGKGTQVTVSS

SEQ ID NO: 1242 - protein, 124 aa, synthetic construct
  REGION 1..124: note = Synthetic Construct
QVQLVESGGGLVQTGGSLRLSCAASGGTGITFRMGWFRQAPGKEREFVSAISWNSAASYYTDSVKGRFTISRDNGKNIVYLQMNSLEPEDTAVYYCAAGIGHDYYTDENGYHYWGHGTQVTVSS

SEQ ID NO: 1243 - protein, 122 aa, synthetic construct
  REGION 1..122: note = Synthetic Construct
QVQLVESGGGLVQAGGSLRLSCAVSGRTFSIAGMGWFRQAPGKDREFLGGITWNDGSTWYADSVKGRFTISRDIAKNIVYLQMNSLKPEDTAVYYCAAGPRLGATPGAYDYWGQGTQVTVSS

SEQ ID NO: 1244 - protein, 123 aa, synthetic construct
  REGION 1..123: note = Synthetic Construct
HVQLVESGGGLVQAGGSLRLSCAASGRTINTVGLAWFRQAPGQQREFVAGIEIGGALRYGDSVQGRFTVSRDNAKNTMYLQMNSLKPEDTAVYYCGAGRGFNIGKNPLGYGNWGQGTQVTVSS

SEQ ID NO: 1245 - protein, 122 aa, synthetic construct
  REGION 1..122: note = Synthetic Construct
HVQLVESGGGLAQAGGPLRLSCAASGSTFSINAIGWFRQAPGKEREFVAWISGSPHDITRYRDSMKDRLTISRDNAKNTVYLQISSLKPEDTAVYYCAVGSLRVGSFSADYWGQGTQVTVSS

SEQ ID NO: 1246 - protein, 122 aa, synthetic construct
  REGION 1..122: note = Synthetic Construct
QVQLVESGGGLVQPGGSLRLSCAASGRSFSSYLMGWFRQAPGKEREFVAWISGSPHDITRYRDSMKDRLTISRDNAKNTVYLQISSLKPEDTAVYYCAVGSLRVGSFSAEYWGQGTQVTVSS

SEQ ID NO: 1247 - protein, 122 aa, synthetic construct
  REGION 1..122: note = Synthetic Construct
HVQLVESGGGLVQPGGSLRLSCAASGRSFSSYLMGWFRQAPGKEREFVAWISGSPHDIIRYRDSMKDRLTISRDNAKNTVYLQMNSLKPEDTAVYYCAVGSLRVGSFSGEYWGQGTQVTVSS

SEQ ID NO: 1248 - protein, 122 aa, synthetic construct
  REGION 1..122: note = Synthetic Construct
HVQLVESGGGLVQAGGSLRLSCAASGRSFNSYLMGWFRQAPGKEREFVAWISGSPHDIIRYRDSVKDRFTISRDNAKNTVYLQMNSLKPVDTAVYYCAVGSLRVGSFSPEYWGQGTQVTVSS

SEQ ID NO: 1249 - protein, 121 aa, synthetic construct
  REGION 1..121: note = Synthetic Construct
QVQLVESGGGLVQAGGSLRLSCAASGRTDSISDMGWFRQAPGKEREFVAVVGWSGGGTDYAHSVKGRFTISRDNAKNTVYLQMNSLKPEDTAVYYCAVGSLRVGSFSVEYWGQGTQVTVSS

SEQ ID NO: 1250 - protein, 124 aa, synthetic construct
  REGION 1..124: note = Synthetic Construct
HVQLVESGGGLVQAGGSLRLTCAASGGTFSTSTMDMGWFRQAPGKEREFVAVDSWNDGRAYYADSVKGRFTISRDSAKTTLYLQMNSLKPEDSAIYYCAGGTYGSTSVRDFGPWGQGTQVTVSS

SEQ ID NO: 1251 - protein, 125 aa, synthetic construct
  REGION 1..125: note = Synthetic Construct
QVQLVESGGGLVQPGGSVRLSCRASGSIRNDYTMAWLRQAAEKEREFVAAVRWTEGITYYRDSVKGRFSISKDNDKNTWYLQMNNLTPEDTAVYLCATGYLYGTSPHAPYAYNYFGRGTQVTVSS

SEQ ID NO: 1252 - protein, 113 aa, synthetic construct
  REGION 1..113: note = Synthetic Construct
HVQLVESGGGLVQAGGSLRLSCTVSGTIFSVIEVAWYRQAPGKQREWVGSISRHHATSIADTGKGRFTISRDNSKNTAYLEMNDLNSDDTATYHCNTIPQRPWGPGTQVTVSS

SEQ ID NO: 1253 - protein, 125 aa, synthetic construct
  REGION 1..125: note = Synthetic Construct
DVQLVESGGRLVHAGDSLRLSCTVSGTTLTDYAMGWFRRFPGKEREFLATLDWESDRTYYADSAEGRFTMSKGSAANTVFLQMNSLKPEDTAVYFCAAKSDAHYTPIHDYEYDYLGRGTQVTVSS

SEQ ID NO: 1254 - protein, 120 aa, synthetic construct
  REGION 1..120: note = Synthetic Construct
HVQLVESGGGLVQAGGSLRLSCVASGDIFSINAMNWYRQPRGKQRELVAQWTPEDNKWYLDSVKDRFTISRGHSENTMYLQMNSLKPEDSAVYYCNIKSGTYLSGLSDLWGQGTQVTVSS

SEQ ID NO: 1255 - protein, 125 aa, synthetic construct
  REGION 1..125: note = Synthetic Construct
QVQLVESGGGLVQAGGSLRLSCAASGSIFSILNMGWYRQAPGKQRDLVARITPGGSTDYADSVKGRFTISRDNAKNTLYLQMNSLKPEDTAVYYCYVNRAGYGSDYWGQGTQVTVFQGTQVTVSS

SEQ ID NO: 1256 - protein, 125 aa, synthetic construct
  REGION 1..125: note = Synthetic Construct
DVQLVESGGGLVQAGGSLRLSCAASGRTFSDYTIGWFRRTPGKEREFVAAISGSTESILYADSVKGRFTISRDNSQNTVYLQIHSLKPEDTAVYYCASPFTTMWPGALAKNYDYWGQGTQVTVSS

SEQ ID NO: 1257 - protein, 117 aa, synthetic construct
  REGION 1..117: note = Synthetic Construct
DVQLVESGGGWVKPGGSLRLACAASGFTFSAHGMTWLRQAPGKGLEWVSDINSSGTSTNYHDSVKGRFTISRDNVKNTLYLQMNSLKPEDTAVYYCAVQDLVRGDYRDQGTQVTVSS

SEQ ID NO: 1258 - protein, 126 aa, synthetic construct
  REGION 1..126: note = Synthetic Construct
HVQLVESGGGLVQAGGSLRLSCAASGRTFSSYAMGWFRQAPGKEREIVAAIPWTGSTTYYADSVKGRFTISRDITKNTVYLQMNSLKPEDAAVYYCAAQGPYSSYLPIRVNEYGYWGQGTQVTVSS

SEQ ID NO: 1259 - protein, 118 aa, synthetic construct
  REGION 1..118: note = Synthetic Construct
HVQLVESGGGLVQAGDSLRVSCAVSGGTFTSYAMGWFRQAPPGKEREFVAAINRSGSGTTVADSVKGRFTISRFNAKNTVYLQMNSLKPEDTAVYYCYAQGQGNREYWGQGTQVTVSS

SEQ ID NO: 1260 - protein, 123 aa, synthetic construct
  REGION 1..123: note = Synthetic Construct
DVQLVESGGGLVQAGGSLRLSCAASGSTFSGNAIGWYRQAPGKQRELVATINAPGSTDYAESVKGRFTISRDNAKNTVFLQMNSLKPEDTAVYYCNVCKFLLSVLCHPGQDYWGQGTQVTVSS

SEQ ID NO: 1261 - protein, 124 aa, synthetic construct
  REGION 1..124: note = Synthetic Construct
HVQLVESGGGLVQPGGSLRLSCVASGLTFSRYTMAWFRQAPGKDRIFVAAVSKPGGSTYYADSVKGRFTISRDNAKNTVYLQMNSLKPDDTAVYSCAADLTVLLTANPAHYNYWGHGTQVTVSS

SEQ ID NO: 1262 - protein, 126 aa, synthetic construct
  REGION 1..126: note = Synthetic Construct
DVQLVESGGGLVQAGGSLRLSCLASGRTFSNYAMAWFRQSPGKEREFVAVITSGRSTDYADSVKGRFTISRDNAKNTVYLQMNSLKPEDTAVYYCAADQAPLRFSYSLSRDKYDYWGQGTQVTVSS

SEQ ID NO: 1263 - protein, 126 aa, synthetic construct
  REGION 1..126: note = Synthetic Construct
QVQLVESGGGLVQPGDSMRLSCVASGLTFSRYTMAWFRQAPGKDRIFVAAVSKPGGSTYYADSVKGRFTISRDNAKNTVYLQMNSLKPEDTAVYFCATDRNFACEYSNYGLRFDYRGHGTQVTVSS

SEQ ID NO: 1264 - protein, 128 aa, synthetic construct
  REGION 1..128: note = Synthetic Construct
QVQLVESGGGLVQAGDSLSLSCTASGGAFSRYDLGWFRQAPGKEREFVIAIARNGAKTYASDSVKGRFTISRDNAKNTVLLQMTSLKPEDTAVYYCAADTAPKYALHATDQSRDYDYWGQGTQVTVSS

SEQ ID NO: 1265 - protein, 122 aa, synthetic construct
  REGION 1..122: note = Synthetic Construct
EVQLVESGGGSVQPGGSLTLSCVASGNAIRGYAMSWVRQVPGEGREWVSGIYSDGSETLYAASVKGRFTISRDDAKNTVYLQMNNLKPEDTGLYFCKVGDPYGVGLREYEWWGPGTQVTVSS

SEQ ID NO: 1266 - protein, 124 aa, synthetic construct
  REGION 1..124: note = Synthetic Construct
HVQLVESGGGLVQAGGSLRLSCAASGPTFSRYGMGWFRQAPGKEREFVAGISWGGTVTYYVDSVKGRFTVSRDNAKNTVFLQMNSLKPDDTAVYSCAAGLTVLLTANPAHYNYWGQGTQVTVSS

SEQ ID NO: 1267 - protein, 125 aa, synthetic construct
  REGION 1..125: note = Synthetic Construct
HVQLVESGGRLVHAGDSLRLSCTVSGTTLTDYAMGWFRRFPGKEREFLATLNWESDRTYYADSAEGRFTMSKGSAANTVYLQMNSLKPEDTAVYFCAAKSDAHYTPIHDYEYDYLGRGTQVTVSS

SEQ ID NO: 1268 - protein, 124 aa, synthetic construct
  REGION 1..124: note = Synthetic Construct
QVQLVESGGGSVQTGGSLRPSCTASGNIHRIYDMGWYRQAPGKQRELVATTSIAPSRTNYADSVKDRFSISRDDAKNTVYLQMNSLMPDDTAVYYCKMNIGDYMRDPYTGYDTWGQGTQVTVSS

SEQ ID NO: 1269 - protein, 130 aa, synthetic construct
  REGION 1..130: note = Synthetic Construct
EVQLVESGGGLVQPGGSLRLSCSASGFSWGDYAIGWFRQAPGKEREGVSCISSTDGRTYYPDFLKDRFAISADYATKTVYLQMTNLKPDDTAIYYCAAREGPGASWYCSRNGYLTQPDSWGQGTQVTVSS

SEQ ID NO: 1270 - protein, 127 aa, synthetic construct
  REGION 1..127: note = Synthetic Construct
QVQLVESGGGLVQAGGSLRLSCAASGRTFGSYTMGWFRQAPGKEREFVASIRQSTTSADLDYANFVKGRFTISRDNAKNTLYLQMNSLKPEDTAVYYCARRGFYGGTYRFPSDYDLWGQGTQVTVSS

SEQ ID NO: 1271 - protein, 127 aa, synthetic construct
  REGION 1..127: note = Synthetic Construct
DVQLVESGGGLVQAGGSLRLSCAASGRSFSTYAMGWFRQAPGKEREFVAGVARSASTTYYTDSVKGRFTISRDNAKNEVYLQMNSLKPEDTAVYYCAARSVIQDTVVPGNPFHYEYWGQGTQVTVSS

SEQ ID NO: 1272 - protein, 124 aa, synthetic construct
  REGION 1..124: note = Synthetic Construct
HVQLVESGGGLVQAGGSLRLSCAASGRTFSNDAMAWFRQAPGKERQFVAGIKWTEGDTEYAASVRGRFTISRDDVKNLVFLQMNNLKLQDTATYYCAQSAGGIIGTSTSWYDYWGQGTQVTVSS

SEQ ID NO: 1273 - protein, 123 aa, synthetic construct
  REGION 1..123: note = Synthetic Construct
QVQLVESGGGLVQAGGSLRLSCAASGSTFSGNAIGWYRQTPGKQRELVATITATSATDYENSVKGRFTISRDDAQNAAYLQMDSLMPEDTAVYYCKMSIGDYMRDPYTGSDYWGQGTQVTVSS

SEQ ID NO: 1274 - protein, 122 aa, synthetic construct
  REGION 1..122: note = Synthetic Construct
DVQLVESGGGLVQAGGSLRLSCAASGGTSRRYTMGWFRQAPGKEREFVSAISNTGATISGANSMEGRFTISRDNAKNTVYLQMNSLKPEDTAVYYCAATSRGWSIGMTYDYWGQGTQVTVSS

SEQ ID NO: 1275 - protein, 123 aa, synthetic construct
  REGION 1..123: note = Synthetic Construct
DVQLVESGGGLVQPGGSLRLSCVVSGLIFDEPNIGWFRQAPGKDREAVSCVSGDESGTYYGDSVKGRFTISRDKAKRTIYLQMNSLKPEDTAVYYCTIQRSCHLPFDPTHDWRGQGTQVTVSS

SEQ ID NO: 1276 - protein, 125 aa, synthetic construct
  REGION 1..125: note = Synthetic Construct
HVQLVESGGGLVQAGGSLRLSCATSGRTFSTYRMSWFRQAPGKEREFVATIIWSVGSTHYADSVKGRFTISRDNAKNMVYLQMNSLKPEDTAVYYCAAQRSDSSSWGYEDDYDYWGQGTQVTVSS

SEQ ID NO: 1277 - protein, 122 aa, synthetic construct
  REGION 1..122: note = Synthetic Construct
HVQLVESGGGLVQAGGSLRLSCAASGRTFGSTMAWFRQAPGKEREFVAAITWSGGTSYADSVKGRFTISRDNAKNTVYLQMNSLKPEDTAVYVCAARASSTTYDDPRSFAFWGQGTQVTVSS

SEQ ID NO: 1278 - protein, 126 aa, synthetic construct
  REGION 1..126: note = Synthetic Construct
EVQLVESGGGLVQAGDSLRLSCAASERTGINYAMGWFRQAPGKERDFVAAIGWNGSITKYAESVKGRFTLSRDDAMNTVSLQMNSLKPEDTAVYYCAARIGSIANLQYREYEFAYWGQGTQVTVSS

SEQ ID NO: 1279 - protein, 123 aa, synthetic construct
  REGION 1..123: note = Synthetic Construct
DVQLVESGGGLVQAGGSLRLSCAASERTFTSYVVGWYRQAPGKGREFVARINEHGDITYYADSVKGRFTISRDNAKNTVYLQMSALKPEDTAVYYCGARKDSVVLSSVGYDYWGQGTQVTVSS

SEQ ID NO: 1280 - protein, 124 aa, synthetic construct
  REGION 1..124: note = Synthetic Construct
HVQLVESGGGLVQAGGSLRLSCAASGRTFSNSHMGWFRQAPGKEREFVAVISRSGGSTLYADSVKGRFTISRDNAKNTVYMQMNSLTPEDTAVYYCAVRLFPGIATSSIDYSSWGQGTQVTVSS

SEQ ID NO: 1281 - protein, 120 aa, synthetic construct
  REGION 1..120: note = Synthetic Construct
QVQLVESGGGLVQAGGSLRLSCAASGSIFSILNMGWYRQAPGKQRDLVARITPGGSTDYADSVKGRFTISRDNAKNTADLQMNSLKPEDTAIYYCNLRQGCSYNGCDEYWGQGTQVTVSS

SEQ ID NO: 1282 - protein, 120 aa, synthetic construct
  REGION 1..120: note = Synthetic Construct
HVQLVESGGGLVQAGESLRLSCVASGSIFSINAMGWFRQAPGKQRELVASISNIGTTIYAESVKGRFTISRDNAKNTADLQMNSLKPEDTAIYYCNLRQGCSYNGCDKYWGQGTQVTVSS

SEQ ID NO: 1283 - protein, 124 aa, synthetic construct
  REGION 1..124: note = Synthetic Construct
DVQLVESGGGLVQAGGSLRLSCAASGRTFNNYFMGWFRQAPGKERVFVAAIRWSDGMTYYANSVKGRFTISRDNTQNTESLQMNSLKPEDSAVYYCAARQSGGVVTNLDEWDYWGQGTQVTVSS

SEQ ID NO: 1284 - protein, 124 aa, synthetic construct
  REGION 1..124: note = Synthetic Construct
EVQLVESGGGLVQAGGSLRLSCAASGRTFNNYFMGWFRQAPGKERVFVAAIRWSDGMTYYANSVKGRFTISRDNTQNTESLQMNSLKPEDSAVYYCAARQSGGVVTNTDEWDYWGQGTQVTVSS

SEQ ID NO: 1285 - protein, 119 aa, synthetic construct
  REGION 1..119: note = Synthetic Construct
DVQLVESGGGLVQAGGSLRLSCAASGRTFSNSHMGWFRQAPGKEREFVAVISRSGGSTLYADSVKGRFTISRDNAKNTQYLQMNSLKPEDTGVYYCAARRAYRGEYDYWGQGTQVTVSS

SEQ ID NO: 1286 - protein, 126 aa, synthetic construct
  REGION 1..126: note = Synthetic Construct
HVQLVESGGGLVQAGGSLRLSCAVSGRTVSTYGMGWFRQAPGKERDFVATITRSGGTTLYADSVKGRFTISRDNAKNTVYLQMNSLKIEDTAVYYCAVRRDSSFGYSRDSFEYDDWGQGTQVTVSS

SEQ ID NO: 1287 - protein, 127 aa, synthetic construct
  REGION 1..127: note = Synthetic Construct
QVQLVESGGGLVQAGGSLRLSCAVSGRTVSTYGMAWFRQTPGKKERDFVATITRSEGTTFYADSVKGRFTISRDNAKNTVYLQMNSLKIEDTAVYYCAVRRDSSWGYSRDLFEYDDWGQGTQVTVSS

SEQ ID NO: 1288 - protein, 126 aa, synthetic construct
  REGION 1..126: note = Synthetic Construct
DVQLVESGGGLVQAGGSLRLSCAVSGRTVSTYGMAWFRQAPGKEREFVATITRSEGTTFYADSVKGRFTISRDNAKNTVYLQMNSLKIEDTAVYYCAVRRDSSWGYSRDSFEYDDWGQGTQVTVSS

SEQ ID NO: 1289 - protein, 124 aa, synthetic construct
  REGION 1..124: note = Synthetic Construct
HVQLVESGGGLVQAGGSLRLSCAASGRTFDNGFMGWFRQAPGKERAFVAAIRMSDGMTYYTNSVKGRFAGSRDNAQNTVSLQMNSLKPEDSAVYYCAARRSGGELVNRDYWDYWGQGTQVTVSS

SEQ ID NO: 1290 - protein, 126 aa, synthetic construct
  REGION 1..126: note = Synthetic Construct
DVQLVESGGGLVQAGGSLRLTCAASGGTFSTSTMDMGWFRQAPGKEREFVAVDSWNDGRAYYADSVKGRFTISRDSAKTTLYLQMNSLKPEDTAVYYCAARRSGGVVTNTDEWDYWGQGTQVTVSS

SEQ ID NO: 1291 - protein, 125 aa, synthetic construct
  REGION 1..125: note = Synthetic Construct
HVQLVESGGGLVQAGGSLRLSCAASGRTLTTYSMAWFRQAPGKEREVVAAITPTGFGTYYADFVKGRFTISRNSAKNTVYLQMDSLKPEDTAVYYCAARSEIIIASPTGGEYDYWGQGTQVTVSS

SEQ ID NO: 1292 - protein, 127 aa, synthetic construct
  REGION 1..127: note = Synthetic Construct
DVQLVESGGGLVQAGGSLRLSCAASGRSFSTYTMGWFRQAPGKEREFVAAIARSGGTTYYTDSVKGRFTISRDNAKNEVSLQMNSLKPEDTAVYTCAARSVTQLDIVLDNPIHYEYWGQGTQVTVSS

SEQ ID NO: 1293 - protein, 127 aa, synthetic construct
  REGION 1..127: note = Synthetic Construct
DVQLVESGGGLVQAGGSLRLSCAASGRTFSTYTMGWFRQAPGKEREFVAAIARSGDTTYYTDSVKGRFTISRDNAKNEVSLQMNSLKPEDTAVYTCAARSVVQLHIVLNNPIHYEYWGQGTQVTVSS

SEQ ID NO: 1294 - protein, 127 aa, synthetic construct
  REGION 1..127: note = Synthetic Construct
QVQLVESGGGLVQTGGSLRLSCAVSGYTFSTFPTAWFRQAPGKEREFVAGIRWNGGSRDYTEYADFVKGRFTISRDNAKNMVYLQMISLKPEDTALYYCAASHGVIDGTSANDYRYWGQGTQVTVSS

SEQ ID NO: 1295 - protein, 127 aa, synthetic construct
  REGION 1..127: note = Synthetic Construct
EVQLVESGGGLVQTGGSLRLSCAFSGYTFSTFPTAWFRQAPGKEREFVAGIRWNGGSRDYTEYADFVKGRFTISRDNAKNMIYLQMISLKPEDTALYYCAASHGVVDGTSVNGYRYWGQGTQVTVSS

SEQ ID NO: 1296 - protein, 126 aa, synthetic construct
  REGION 1..126: note = Synthetic Construct
HVQLVESGGGLVQAGGSLRLSCAASGFTFSNYVMYWGRQAPGKGREWVSGIDSDGSDTAYASSVKGRFTISRDNAKNTLYLQMNNLKPEDTALYYCVKSKDPYGSPWTRSEFDDYWGQGTQVTVSS

SEQ ID NO: 1297 - protein, 126 aa, synthetic construct
  REGION 1..126: note = Synthetic Construct
HVQLVESGGGLVQAGGSLRLSCAASGRTFSNYVMYWGRQAPGKGREWVSGIDSDGSDTAYASSVKGRFTISRDNAKNTLYLQMNNLKPEDTALYYCVKSKDRFGSPWTRSEFDDYWGQGTQVTVSS

SEQ ID NO: 1298 - protein, 124 aa, synthetic construct
  REGION 1..124: note = Synthetic Construct
HVQLVESGGGLVQAGGSLRLSCAASGRTFSNSHMGWFRQAPGKEREFVAVISRSGGSTLYADSVKGRFTISRDNAKNTVYLQMNSLKPEDTAVYYCAASRTAGLTSNRSLYDYWGQGTQVTVSS

SEQ ID NO: 1299 - protein, 127 aa, synthetic construct
  REGION 1..127: note = Synthetic Construct
HVQLVESGGGLVQAGGSLRLSCAASGRTFSTYTMSWFRQRPGKEREFVAGLRWATGMPYSADSVKGRFTCSKDSFKDTMYLQMYTLKPEDTAIYYCAASTDVLVLTGIEEARLYDTWGQGTQVTVSS

SEQ ID NO: 1300 - protein, 126 aa, synthetic construct
  REGION 1..126: note = Synthetic Construct
DVQLVESGGGLVQPGGSLRLSCAASGGTVSAYGMAWFRQAPGQEREFVASISASGDMTDYEHFAKGRFTISRDNAKNTVYLQMNSLKPEDTAIYYCAASYYSGSQRFPRLNDYDFWGQGTQVTVSS

SEQ ID NO: 1301 - protein, 125 aa, synthetic construct
  REGION 1..125: note = Synthetic Construct
QVQLVESGGGLVQAGGSLRLSCAASGSIFSILNMGWYRQAPGKGREWVAGIQREGTETHYADSVKGRFTVSRDNVKNTLYLQMNSLKPEDTALYYCAKVLGRPYGRTWLDDIDVWGKGTQVTVSS

SEQ ID NO: 1302 - protein, 125 aa, synthetic construct
  REGION 1..125: note = Synthetic Construct
HVQLVESGGGLVQAGGSLRLSCAASGGTFSTYAMSWVRQAPGKGREWVAGIQREGTETNYADSVKGRFTISRDNVKNMLYLQMNSLKPEDTALYYCAKVLGRPYGSHWLSDMDAWGKGTQVTVSS

SEQ ID NO: 1303 - protein, 124 aa, synthetic construct
  REGION 1..124: note = Synthetic Construct
QVQLVESGGGLVQAGGSLRLSCAASGGTFSTSTMDMGWFRQAPGKEREFVAVDSWNDGRAYYADSVKGRFTVSRDNANAYLRMNNLKRDDTAVYYCAAVNQVIGSRLVSGYDYWGQGTQVTVSS

SEQ ID NO: 1304 - protein, 126 aa, synthetic construct
  REGION 1..126: note = Synthetic Construct
AQVQLVESGGGLVQAGGSLRLSCAASGRTFSNSHMGWFRQAPGKEREFVAVISRSGGSTLYADSVKGRFTISRDNAKNTLYLQMNNLKPEDTALYYCAKVLGRPYGSTWLDDIDAWGKGTQVTVSS

SEQ ID NO: 1305 - protein, 117 aa, synthetic construct
  REGION 1..117: note = Synthetic Construct
ADVQLVESGGGLVQAGGSLRLSCAVSGSTLGINAIGWYRQPPGKQRELVASISSLGTTLYAESVKGRFAISRDNAKNTGYLQMNSLKPDDTAVYYCNMRTPYMRDYWGRGTQVTVSS

SEQ ID NO: 1306 - protein, 128 aa, synthetic construct
  REGION 1..128: note = Synthetic Construct
AQVQLVESGGGLVQAGGSLRLSCAASGRTLMNYHMGWFRQAPGKEREFVAAITWNGDDTDYADSVKGRFTISRDNAKNMVSLQMNSLNLEDTGVYYCAASRPSYGSPLQRQPSGYDYWGQGTQVTVSS

SEQ ID NO: 1307 - protein, 124 aa, synthetic construct
  REGION 1..124: note = Synthetic Construct
AHVQLVESGGGLVQPGDSLRLSCAASGHTFSTNTMGWFRQAPGKEREFVGCITWSDYTLYTDSVKGRFTISRDNSKSTVYLQMNSLKPEDTAVYYCAAVPGAAVVTTASLYHTWGQGTQVTVSS

SEQ ID NO: 1308 - protein, 121 aa, synthetic construct
  REGION 1..121: note = Synthetic Construct
AHVQLVESGGGLVQPGGSLRLSCAASGFTFSSYAMSWVRQAPGKQRDLVARITPGGSTDYADSVKGRFTISRDNAKNTLYLQMNSLKPEDTAVYYCNRWRSLSNVNAGDYWGQGTQVTVSS

SEQ ID NO: 1309 - protein, 120 aa, synthetic construct
  REGION 1..120: note = Synthetic Construct
AQVQLVESGGGLVAAGGSLRLSCAASGTSFRFSAIDWYRQAPGQQREFVASISTSGRISYGHFVKGRFTISRDNAKNTMYLQMNSLKPEDTAVYYCHLAQPDVFGGGDYWGQGTQVTVSS

SEQ ID NO: 1310 - protein, 123 aa, synthetic construct
  REGION 1..123: note = Synthetic Construct
ADVQLVESGGGLVQAGGSLRLSCTASGFNFGSYATAWFRQAPGKGREFVAGISWSTRNTYYADSVKGRFTVSRDNEQTTMSLQMNRLKPEDTAVYYCAARFGIVTTRDEYEFYGQGTQVTVSS

SEQ ID NO: 1311 - protein, 123 aa, synthetic construct
  REGION 1..123: note = Synthetic Construct
AHVQLVESGGGLAQSGDSLRLSCAASGRTFDINYMAWFRRAPGKQRELVAGITSGGNANYADSVKGRFTISRDNVKNTVYLQMNSLKPEDTAVYYCNAVGPRFNPRGSPTNYWGQGTQVTVSS

SEQ ID NO: 1312 - protein, 121 aa, synthetic construct
  REGION 1..121: note = Synthetic Construct
AQVQLVESGGGLVQAGGSLRLSCAASGSIFRINAMGWYRQAPGKQRDLVTTITSAGIPHYADSVKGRFTISRDNAKNTVYLQMNGLKPEDTAVYYCYANTLNSQLLPRAYWGQGTQVTVSS

SEQ ID NO: 1313 - protein, 123 aa, synthetic construct
  REGION 1..123: note = Synthetic Construct
AQVQLVESGGGLVQAGGSLRLSCAASGRTFSDYAMGWFRQAPGKEREHVATIDWSGTATDYADFVKGRFTISRDNAENLVYLEMNSLKPEDTATYYCATPRTKSSGWGPDNYWGQGTQVTVSS

SEQ ID NO: 1314 - protein, 126 aa, synthetic construct
  REGION 1..126: note = Synthetic Construct
AEVQLVESGGGLVHPGGSLRLSCAASGFTFSTYAMSWVRQAPGKGREWVAGIQREGTETNYADSVKGRFTISRDNVKNTLYLQMNSLKPEDTALYYCAKVLGRPYGSSWLDDMDAWGKGTQVTVSS

SEQ ID NO: 1315 - protein, 126 aa, synthetic construct
  REGION 1..126: note = Synthetic Construct
AQVQLVESGGGLVQAGGSLRLSCAASGFTFSTYAMTWVRQAPGKGREWVAGIQREGTETHYTDSVKGRFTISRDNAKNTVYLQMNNLKPEDTALYYCAKVLGRPYGSRWLEDIDVRGRGTQVTVSS

SEQ ID NO: 1316 - protein, 128 aa, synthetic construct
  REGION 1..128: note = Synthetic Construct
AHVQLVESGGGLVQAGDSLRLSCAASGRTLMNYHMGWLRQAPGKEREFVAAITWNGDTTDYADSVKGRFTISRDNAKNMVSLQMNSLKPEDTGVYYCAASRPSYGLPLQRQSSGYDYWGQGTQVTVSS

SEQ ID NO: 1317 - protein, 123 aa, synthetic construct
  REGION 1..123: note = Synthetic Construct
AHVQLVESGGGLAQSGDSLRLSCAASGRTDTVTTMAWFRQPPGKEREFVVAIREGGGSTYANAVKGRFTVSRDNAKNTMFLQMNSLKPEDTAVYYCAGRWGGSTYFAKDYEHWGQGTQVTVSS

SEQ ID NO: 1318 - protein, 120 aa, synthetic construct
  REGION 1..120: note = Synthetic Construct
AEVQLVESGGGLVQAGGSLRLSCAASGSALGGNRMGWFRQAPGKDREFVAAINYSGGMTNYADSVKGRFTISRDLAKNTVNLQMNDLKPEDTAVYYCAARSLESGEYDNWGQGTQVTVSS

SEQ ID NO: 1319 - protein, 125 aa, synthetic construct
  REGION 1..125: note = Synthetic Construct
ADVQLVESGGGLVQAGGSLRLSCAASGRSSSTHVMGWFRQAPGKEREFVAAISWRGGSTYYADSVKGRFTISRDNAEKTGALQMNSLKPEDTAVYYCAARMGNVLMTRPSDYGYWGQGTQVTVSS

SEQ ID NO: 1320 - protein, 128 aa, synthetic construct
  REGION 1..128: note = Synthetic Construct
ADVQLVESGGGLVPAGGSLRLSCAASGRAFISFGINSIAWFRQAPGKEREFVAVLEWRSGSTYHADSVKGRFAISKDNAKNTVDLQMNSLKPEDTAVYYCAAANWFGRSDDAGQYTYWGQGTQVTVSS

SEQ ID NO: 1321 - protein, 125 aa, synthetic construct
  REGION 1..125: note = Synthetic Construct
AHVQLVESGGGLVQAGGSLRLSCAASGRTFSSYTMGWFRQAPGKERTFVAAIRWSDAMAYYTNSVKGRFAVSRDNAQYTVSLQMNSLKPEDSAVYYCAARRSGGELTNTDYWDYWGQGTQVTVSS

SEQ ID NO: 1322 - protein, 125 aa, synthetic construct
  REGION 1..125: note = Synthetic Construct
ADVQLVESGGGLVQTGGSLRLSCTASGRTFDIHYMAWFRRAPGKERDLVCTTKWSGGETYCAGSVNGRFTISRDNGKNAVYLQMNNLHPEDTAVYYCAARLFPGIATTAIDYSSWGQGTQVTVSS

SEQ ID NO: 1323 - protein, 121 aa, synthetic construct
  REGION 1..121: note = Synthetic Construct
ADVQLVESGGGLVQAGGSLRLTCAASGRTFSVSTMDMGWFRQAPGKEREFVAVENWNGGRTYYADSVKGRFAISRDNGKNTVYLQMNSLKPEDAAVYVCNAYDLRDRLQWWGQGTQVTVSS

SEQ ID NO: 1324 - protein, 125 aa, synthetic construct
  REGION 1..125: note = Synthetic Construct
AQVQLVESGGGLVQAGGSLRLSCAASGRTFDISYMGWFRRAPGKEREFVCTIKWTGDDAYCAGSVGGRFTISRDNAKNTVYLQMSSLNREDTAVYYCAGRLFPGIATSSLDYASWGQGTQVTVSS

SEQ ID NO: 1325 - protein, 127 aa, synthetic construct
  REGION 1..127: note = Synthetic Construct
AHVQLVESGGGLVQAGGSLRLSCAVSGGTLSNGYMAWFRQAPGKEREFVAAMGWSTTTTYYADSVEGRFTMSRDNAKSTVYLQMNSLKPEDTAVYYCATNSRFSAYEISNRLRYDYWGQGTQVTVSS

SEQ ID NO: 1326 - protein, 118 aa, synthetic construct
  REGION 1..118: note = Synthetic Construct
AEVQLVESGGGLVQAGGSLRLSCAVSGAGAHRVGWFRRAPGKEREFVAAIGASGGMTNYLDSVKGRFTISRDNAKNTIYLQMNSLKPQDTAVYYCAARDIETAEYIYWGQGTQVTVSS

SEQ ID NO: 1327 - protein, 128 aa, synthetic construct
  REGION 1..128: note = Synthetic Construct
AEVQLVESGGGLVQAGGSLRLSCAASGDTFSNYNMAWFRQAPGKERDFVAGISWSGGSTYNTDSVKGRFTMSRDNAKNTVYLQMNSLKPEDTGVYYCAASRPSYGLPLQRQPSGYDYWGQGTQVTVSS

SEQ ID NO: 1328 - protein, 117 aa, synthetic construct
  REGION 1..117: note = Synthetic Construct
AEVQLVESGGGLVQAGGSLRLSCAASGRTFSIYNMGWFRQAPGKEREFVSHMDWSGGYTSTAASVKDRFTISRDNAKNTVYLQMSSLKPEDTAVYYCHATTNDYDYWGQGTQVTVSS

SEQ ID NO: 1329 - protein, 126 aa, synthetic construct
  REGION 1..126: note = Synthetic Construct
AEVQLVESGGGLVQAGGSLRLSCAASGRTVSSSTMDMGWFRQAPGKEREFVAADSWNDGRTYYADSVKGRFTISRDNAKNTLYLQMNSLKPGDTAVYYCAAETYSLYEKEYSWGYWGQGTQVTVSS

SEQ ID NO: 1330 - protein, 128 aa, synthetic construct
  REGION 1..128: note = Synthetic Construct
AHVQLVESGGGLVQAGGSLRLSCAASGRAFITFSINTIAWFRQAPGKEREFVAVLEWESGSTYHADSVKGRFAISKDNAKNTVDLQMNSLKPEDTAVYYCAGANWFGRSDDAGQYSYWGQGTQVTVSS

SEQ ID NO: 1331 - protein, 128 aa, synthetic construct
  REGION 1..128: note = Synthetic Construct
AHVQLVESGGGLVQAGGSLRLSCAASGFTLNDYAIAWFRQAPGKEREGVSCISGSDGTTYYADSVKGRFTISRDNAKNTVYLQMNSLKPEDTAVYYCATDIAPFYCSWPLRTRLVEYWGQGTQVTVSS

SEQ ID NO: 1332 - protein, 120 aa, synthetic construct
  REGION 1..120: note = Synthetic Construct
ADVQLVESGGGLVQAGGSLRLSCAASGSIFSSNAMSWYRQAPGKQRELVASITSGGNADYEDSVKGRFTISRDKDTVYLEMNSLKPADTAVYYCNAVGQEGSAYAPRAYWGKGTQVTVSS

SEQ ID NO: 1333 - protein, 131 aa, synthetic construct
  REGION 1..131: note = Synthetic Construct
ADVQLVESGGGLVQAGGSLRLSCTASGRTFSAYSMGWFRQAPAEEREFVAAFSGSPSTTSMTNYADSVKGRFTISRDNAKNTVYLQMDSLKPEDTAVYYCAAEEWGSGTLRPTSTSWYHYWGQGTQVTVSS

SEQ ID NO: 1334 - protein, 118 aa, synthetic construct
  REGION 1..118: note = Synthetic Construct
AQVQLVESGGGLVQAGGSLRLSCAASGGTFTTFRMAWFRQAPGKEREFVAAISWGFANYADSVKGRFTISRDNAKNTVYLQMSSLKPEDTAVYYCAARTPETGQYDYWGQGTQVTVSS

SEQ ID NO: 1335 - protein, 124 aa, synthetic construct
  REGION 1..124: note = Synthetic Construct
AQVQLVESGGGLVQAGGSLRVSCAASGRTFSSYAMGWFRQAPGKEREFVAAISWSGGSTYYADSVKGRFTISRNNAKNTVYLQMNSLKSEDTAVYYCAADRTAYYTNSRYYDYWGQGTQVTVSS

SEQ ID NO: 1336 - protein, 125 aa, synthetic construct
  REGION 1..125: note = Synthetic Construct
AQVQLVESGGGLVQAGDSLRLSCAASGHTFDISYMAWFRRAPGKEREFVCTIKWTGDDAYCAGSVGGRFTISRDNAKNTVYLQMSGLNPEDTAVYYCAGRLFPGIATSSLDYSSWGQGTQVTVSS

SEQ ID NO: 1337 - protein, 130 aa, synthetic construct
  REGION 1..130: note = Synthetic Construct
AHVQLVESGGGLVQAGGSLRLSCAASGFTLDDYAIGWFRQAPGKEREGVSCISSGDGSTVYADSVKGRFTISRHNAKNTVYLQMNSLKPEDTAVYYCATFAGRSQYYCSDYGSLREYDYWGQGTQVTVSS

SEQ ID NO: 1338 - protein, 125 aa, synthetic construct
  REGION 1..125: note = Synthetic Construct
AHVQLVESGGGLVQAGGSLRLSCAASGRTFSNAFMGWFRQAPGKERMFVGAIRWSDDMTYYSNSVKGRFTISRDNAQTTVSLQMNSLKPEDSAVYYCAARRSGGELVNKDYWDYWGQGTQVTVSS

SEQ ID NO: 1339 - protein, 128 aa, synthetic construct
  REGION 1..128: note = Synthetic Construct
ADVQLVESGGGLVQVGGSLRLSCAASGRTFNRYAAGWFRQAPGKEREFVAVIEWNGDSAYYVDSVKGRFTISRDNAKNTVYLQMNRLKPEDTASYICAVGGNHYSPSKYYTADEYDYWGQGTQVTVSS

SEQ ID NO: 1340 - protein, 121 aa, synthetic construct
  REGION 1..121: note = Synthetic Construct
AQVQLVESGGGLVQAGGSLRLSCVPSTSIFSANAMGWYRQAPGEQRELVASITSGGNTNYADSVKGRFTISRDNADTVILQMNSLKPEDTAVYYCKGTAYSTTYNSVRDYWGQGTQVTVSS

SEQ ID NO: 1341 - protein, 120 aa, synthetic construct
  REGION 1..120: note = Synthetic Construct
AHVQLVESGGGLVQPGGSLRLSCTASGSIFSSNAMSWYRQAPGKQRELVASITSGGNTDYADSVKGRFTLSRDKDTVYLEMSSLKPADTAVYYCQAVGQDASAYAPRAYWGQGTQVTVSS

SEQ ID NO: 1342 - protein, 118 aa, synthetic construct
  REGION 1..118: note = Synthetic Construct
AQVQLVESGGGLVQAGDSLRLSCAASGASPYRVGWFRRAPGKEREFVAAIGASGGFTNYLDSVKGRFTISRDNAKNTVYLQMNRLKPQDTAVYYCAARDIETAEYTYWGQGTQVTVSS

SEQ ID NO: 1343 - protein, 123 aa, synthetic construct
  REGION 1..123: note = Synthetic Construct
AQVQLVESGGGLVQPGGSLRLSCVASGSGFEPNAMGWYRQAPGKQRELVAGITSGGNTNYADSVKGRFTISRDNVKNTVYLQMNSLKPEDTAVYYCNAVGPRINPRGSPTNYWGQGTQVTVSS

SEQ ID NO: 1344 - protein, 124 aa, synthetic construct
  REGION 1..124: note = Synthetic Construct
AQVQLVESGGGLVQAGGSLRLSCAASGRTFSVNSIAWFRQAPGKEREFVATINWSGGDIYYADSVKGRFTISRDNGKNTVYLQMNSLKPTDTAVYYCAAARFYGRSIAQDYDSWGQGTQVTVSS

SEQ ID NO: 1345 - protein, 124 aa, synthetic construct
  REGION 1..124: note = Synthetic Construct
ADVQLVESGGGLVQTGGSLRLSCAASGRTFSTNTVGWFRQAPGKEREFVGCITWSDYTLFADSVKGRFTISRDNSKSTVYLQMNSLKPEDTAVYYCAAVPGAAVVTTASIYHTWGQGTQVTVSS

SEQ ID NO: 1346 - protein, 128 aa, synthetic construct
  REGION 1..128: note = Synthetic Construct
AEVQLVESGGGLVQAGGSLRLSCAASGRTFSSYSMGWFRQAPGKEREFVAFVRWSGSSTYYADSVKGRFTVSRDNAKNTVYLQMNGLKPEDTAVYYCAASSRTMIAPSQAMPINWDYWGQGTQVTVSS

SEQ ID NO: 1347 - protein, 123 aa, synthetic construct
  REGION 1..123: note = Synthetic Construct
AQVQLVESGGGLVQPGGSLRLSCAASGRTFDIQYMGWFRRAPGKEREFVCTIKWNGEDTYCADSGRFSISRDNAKNMVYLQMNSLTPEDTAVYYCAARLFPGIATTSIDYSSWGQGTQVTVSS

SEQ ID NO: 1348 - protein, 117 aa, synthetic construct
  REGION 1..117: note = Synthetic Construct
AQVQLVESGGGLAQSGDSLRLSCAASGRTFDINYMAWFRRAPGKEREFVCTTKWSGEDTYCDGSVQGRFTISSDNAYDTVYLQMNSLKPEDTAVYYCNKRGYGMDYWGKGTQVTVSS

SEQ ID NO: 1349 - protein, 126 aa, synthetic construct
  REGION 1..126: note = Synthetic Construct
ADVQLVESGGGSVQAGGSLRLSCAASGRTLRSYNMGWFRQAPGKEREFVAASSWTGVGTYYADSVKGRFTISRDNTKNTLYLQMDSLKPEDTAVYYCAADSTIDRLHSAGSDYRYWGQGTQVTVSS

SEQ ID NO: 1350 - protein, 122 aa, synthetic construct
  REGION 1..122: note = Synthetic Construct
ADVQLVESGGGLVQAGESLRLSCAASGDMFSSNAMAWYRQAPGKQRELVASITSGGNTNYADSVKGRFTISRDNAKNTVYLQMDSLKPEDTAVYYCNGVAYDYSWGRPRNFWGQGTQVTVSS

SEQ ID NO: 1351 - protein, 130 aa, synthetic construct
  REGION 1..130: note = Synthetic Construct
AEVQLVESGGGLVQAGGSLRLACAASGRTFDTHATGWFRQAPGKEREFLATSVWLGDISRDSTYYAESVKGRFTISRDNAKNTVYLQMNSLKPEDTALYYCAVRQAVGPGIMSALTYDYWGQGTQVTVSS

SEQ ID NO: 1352 - protein, 121 aa, synthetic construct
  REGION 1..121: note = Synthetic Construct
AHVQLVESGGGLVQAGGSLRLSCTASGDTNRYSVMRWFRQAPGKEREFVAHITPGGNTYYISSVKGRFTISRDTAKNTLYLQMNSLKPEDTALYYCNAQDFASPVGPRDYWGQGTQVTVSS

SEQ ID NO: 1353 - protein, 126 aa, synthetic construct
  REGION 1..126: note = Synthetic Construct
ADVQLVESGGGLVQAGDSLRLSCAASEPSFSRYSMAWFRQAPGKERDIVAAITQTGFGTYYTDSVKGRFTISRDNAKNTMYLQMNSLKPEDTAVYYCAAKYGYLQPMGRNTVIDYWGQGTQVTVSS

SEQ ID NO: 1354 - protein, 128 aa, synthetic construct
  REGION 1..128: note = Synthetic Construct
AQVQLVESGGGLVQAGGSLRLSCAASGGTFSRYAAGWFRQAPGKEREFVAVIDWNGGSAYYADSVKGRFTISRDNAKNTVYLQMNRLKPEDTAVYICAVGGNHYSRSRYYTADEYDYWGQGTQVTVSS

SEQ ID NO: 1355 - protein, 134 aa, synthetic construct
  REGION 1..134: note = Synthetic Construct
ADVQLVESGGGLVQAGGSLRLSCTASGRTLSNYAMGWFRQAPGKEREFVAVIRQRTGTKSYTYYADSVKGRFTISGDGAKMTVSLQMNSLKPEDTAVYYCAIDLIEYYRSTYYYSTQPSSYDYWGQGTQVTVSS

SEQ ID NO: 1356 - protein, 126 aa, synthetic construct
  REGION 1..126: note = Synthetic Construct
AQVQLVESGGGLVQAGGSLRLSCAVSGSIFSINGMGWYRQAPGKGQEWVAGIQREGTETNYADSVKGRFTISRDNAKRTLYLQMNNLKPEDTGVYYCAKVLGRPYGSRWLDDVDSWGRGTQVTVSS

SEQ ID NO: 1357 - protein, 131 aa, synthetic construct
  REGION 1..131: note = Synthetic Construct
AQVQLVESGGGLVQPGGSLRLSCAMSGFILDDYAIGWFRQAPGKEREGVSCIGTSDGMTYYADAVKGRFTISADYAKNTLFLQMNSLKTEDTAVYYCAAVSKVFARDYADWWSGLFSFGYQGQGTQVTVSS

SEQ ID NO: 1358 - protein, 123 aa, synthetic construct
  REGION 1..123: note = Synthetic Construct
ADVQLVESGGGLVQAGGSLRLSCAASGRDFSSYAMGWFRQAPGKEREFVGVISSGDVGTFYEDSVKGRFTISRDDAKNTVDLQMNSLKPEDTAVYYCAAALYVTSTRGSYAYWGQGTQVTVSS

SEQ ID NO: 1359 - protein, 128 aa, synthetic construct
  REGION 1..128: note = Synthetic Construct
ADVQLVESGGGLVQAGGSLRLSCAASGRTFSSYAMGWFRQAPGKEREFVAAISGSKSSIRYTDSVKGRFTISRDNGDNGRNTVYLYMNKLSPDDTAVYYCASPYTTQWATESRDYDYWGQGTQVTVSS

SEQ ID NO: 1360 - protein, 127 aa, synthetic construct
  REGION 1..127: note = Synthetic Construct
AHVQLVESGGGLVHAGGSLRLSCAASGRTYSSYRMGWFRQAPGKEREFVATINRSGDSTSYADSVKGRFTISRDNAKNTVYLQMNSLEPADTAVYYCAADLLPGTYLYTAQNAYAYWGQGTQVTVSS

SEQ ID NO: 1361 - protein, 126 aa, synthetic construct
  REGION 1..126: note = Synthetic Construct
AHVQLVESGGGLVQAGGSLRLSCAASGRTVSTYVMAWFRQAAGKEREFVAHISWTGDETNYADSVRGRFTISRDNAKNTVYLQMNSLKPEDTAVYYCAADRGYSLYYYSSREYVYWGQGTQVTVSS

SEQ ID NO: 1362 - protein, 126 aa, synthetic construct
  REGION 1..126: note = Synthetic Construct
AEVQLVESGGGLVQAGGSLRLSCAASGGTFRSYNMGWFRQGPGKEREFVAALSWTGVGTYYADSVKGRFTISRDITKNTVYLQMDSLKPEDTAVYYCAADSNTYRLHSAGTEYRYWGQGTQVTVSS

SEQ ID NO: 1363 - protein, 126 aa, synthetic construct
  REGION 1..126: note = Synthetic Construct
AQVQLVESGGGLVQPGGSLRLSCAASGFTFRNSAMSWVRQAPGKGREWVAGIQREGTETKYIDSVKGRFTISRDNAKSTLYLQMNNVKPEDTGLYYCAKVLGRPYGSRWLDDVGSWGKGTQVTVSS

SEQ ID NO: 1364 - protein, 123 aa, synthetic construct
  REGION 1..123: note = Synthetic Construct
ADVQLVESGGGLVQPGGSLRLSCAASGRSNAFMGWFRQAPGKERIFVAAVRWTDGMTYYSNSVKGRFAGSRDNAQNTVYLQMNSLQPEDSAVYYCAARRSGGELTNRDYWDYWGQGTQVTVSS

SEQ ID NO: 1365 - protein, 128 aa, synthetic construct
  REGION 1..128: note = Synthetic Construct
ADVQLVESGGGSVQTGGSLRLSCAASGRTLMNYHMGWLRQAPGKEREFVAAITWNGDATEYADSVKGRFTISRDNAKNMVSLQMNSLKPEDTGVYYCAASRPSYGLPLQRHPSGYDYWGQGTQVTVSS

SEQ ID NO: 1366 - protein, 125 aa, synthetic construct
  REGION 1..125: note = Synthetic Construct
AEVQLVESGGGLVQAGGSLRLSCAASGLALKDHTMSWFRQVPGKEREAVACISGIDTRYADSVGGRFTISRDDAKSTAYLQMNSLAPEDTAVYFCGADRLSFCGSAWYAPVQTYWGQGTQVTVSS

SEQ ID NO: 1367 - protein, 126 aa, synthetic construct
  REGION 1..126: note = Synthetic Construct
AQVQLVESGGGLVQAGGSLRLSCAASGRTLRSYNMGWFRQAPGKEREFVAALSWTGVGTYYGDSVKGRFTISRDVTKNTLYLQMDSLKPEDTAIYYCAADSTTDRLHSAGSDYRYWGQGTQVTVSS

SEQ ID NO: 1368 - protein, 116 aa, synthetic construct
  REGION 1..116: note = Synthetic Construct
AHVQLVESGGGLVQAGGSLRLSCAASGSTDSIGSIGWFRQAPGKQRELVALISSAGRTTYGSSVKGRSTISRDSAKNTVSLRVTSLKPDDTAVYLCYAVDNHMDYWGQGTQVTVSS

SEQ ID NO: 1369 - protein, 126 aa, synthetic construct
  REGION 1..126: note = Synthetic Construct
AHVQLVESGGGLVQAGGSLRLTCRASGRTFSSSTMDMGWFRQAPGKEREFVAVDAWNDGRTYYTDSVKGRFTISRDNAKTTLYLQMNSLKPEDTAVYYCAAETYSNYEKDDSWGYWGQGTQVTVSS

SEQ ID NO: 1370 - protein, 120 aa, synthetic construct
  REGION 1..120: note = Synthetic Construct
AQVQLVESGGDLVQAGGSLRLSCAASGSIFSSNAMSWYRQAPGKQRELVASITSGGNADYADSVKGRFTISRDKNTVYLEMSSLKPADTAVYYCHAVGQEASAYAPRAYWGQGTQVTVSS

SEQ ID NO: 1371 - protein, 125 aa, synthetic construct
  REGION 1..125: note = Synthetic Construct
ADVQLVESGGGLVQAGGSLRLSCAASERTFSSYIMGWFRQAPGKEREFVAAITRSGGSTYYADSVKGRFTISRDNAKNTVYLQMNSLKPEDTAVYYCAAAGGVLLTTTPRRYDYWGQGTQVTVSS

SEQ ID NO: 1372 - protein, 126 aa, synthetic construct
  REGION 1..126: note = Synthetic Construct
AHVQLVESGGGLVQAGGSLRLSCAASGFIFSTYAMSWVRQAPGKGREWVAGIQREGTETNYADSVKGRFTISRDNVKNMLYLQMNNLKPEDTALYYCAKVLGRPYGRTWLDDIDAWGKGTQVTVSS

SEQ ID NO: 1373 - protein, 120 aa, synthetic construct
  REGION 1..120: note = Synthetic Construct
ADVQLVESGGGFVQAGGSLRLSCAASGRAIGIHRMAWFRQAPGKERAFVAAIQWTGDMPTYADSLKGRFTISADNAKNTVSLQMTSLKPDDTAVYYCAARSATTALYDYWGQGTQVTVSS

SEQ ID NO: 1374 - protein, 130 aa, synthetic construct
  REGION 1..130: note = Synthetic Construct
AEVQLVESGGGLVQAGGSLRLSCTASGPTVSFFSYSMAWFRQAPGKEREFVAGVTRTGGRRNYADSVQGRFTISKDNAKNTVSLQMNSLKSDDTAIYYCAADATRTYSSLSQRTDDYDYWGQGTQVTVSS

SEQ ID NO: 1375 - protein, 126 aa, synthetic construct
  REGION 1..126: note = Synthetic Construct
AQVQLVESGGGLVQAGGSLRLSCVASRSTSYDIGWYRQAPGKQRELVAQISSDGERRNYAGSVMGRVTISMDNARNTVYLQMHKLAPEDTGVYYCLAAGPGKPLRNYYTDYDTDSWGQGTQVTVSS

SEQ ID NO: 1376 - protein, 126 aa, synthetic construct
  REGION 1..126: note = Synthetic Construct
AEVQLVESGGGLVQAGGSLRLSCAASGRTVSMSTMDMGWFRQAPGKERDFVAADAWNDGRTYYADPVKGRFTISRDNAKNTLYLQMNSLKPEDTAVYYCAAETYSLYEKDYSWGYWGQGTQVTVSS

SEQ ID NO: 1377 - protein, 116 aa, synthetic construct
  REGION 1..116: note = Synthetic Construct
AEVQLVESGGGLVQAGGFLRLSCAASGSTSSINSIGWFRQAPGKQRELVAIISSAGSTSYGNSVKGRFTISRDNAKNTVSLQMSSLKPDDTAVYYCYAVDNQMDYWGQGTQVTVSS

SEQ ID NO: 1378 - protein, 128 aa, synthetic construct
  REGION 1..128: note = Synthetic Construct
AHVQLVESGGGLVQPGGSLRLSCAVSGYTFSIFPLAWFRQAPGKEREFVAGIRWNGHSRDYAEYADFAKGRFTISRDNAKNMVYLQMISLKPEDTALYYCAASHGVIDGTNANDYRYWGQGTQVTVSS

SEQ ID NO: 1379 - protein, 128 aa, synthetic construct
  REGION 1..128: note = Synthetic Construct
AHVQLVESGGGLVQPGGSLRLSCAASGDTFSMYAMGWFRQAPGKEREFVAAISRNGGSIGYADSVKGRFTISRDNAKNTVYLHMNSLKPEDAAVYYCAAGVFHVDGGYYSTRDSYAYWGQGTQVTVSS

SEQ ID NO: 1380 - protein, 131 aa, synthetic construct
  REGION 1..131: note = Synthetic Construct
AHVQLVESGGGLVQAGGSLRLSCAASGRTFSNYAMGWFRQAPGKEREGVSCLSSRDGSTFVQYSLKDRFIISGDNVKNTVYLQMNRLKPEDTAVYYCAAALGSDSQRTVIAGCPIRYFGSWGQGTQVTVSS

SEQ ID NO: 1381 - protein, 125 aa, synthetic construct
  REGION 1..125: note = Synthetic Construct
AEVQLVESGGGLAQSGDSLRLSCAASGRTFDINYMAWFRRAPGKEREFVCTTKWSGEDTYCDGSVQGRFTISRDNAKNSVYLQMDSLQPEDSAVYYCAARLFPGIATSSLDYTSWGQGTQVTVSS

SEQ ID NO: 1382 - protein, 128 aa, synthetic construct
  REGION 1..128: note = Synthetic Construct
AQVQLVESGGGLVQAGGSLRLSCAASGRTFSSYAMGWFRQAPGKEREFVGAISRSGGGTSYLDSVKGRFTISRDNAKNTMYLQMNSLKPEDTAVYYCAADLSALWHGVPTTARQYDSWGQGTQVTVSS

SEQ ID NO: 1383 - protein, 124 aa, synthetic construct
  REGION 1..124: note = Synthetic Construct
ADVQLVESGGGLVQAGASLRLSCAASGRTFGSTMAWFRQAPGKEREFVAGITWSGDRISYADSVKGRFTISRDNAQNTVYLQMNSLKPEDTAVYHCAARASSSTWDDPRSFAFWGQGTQVTVSS

SEQ ID NO: 1384 - protein, 125 aa, synthetic construct
  REGION 1..125: note = Synthetic Construct
AQVQLVESGGGLAQSGDSLRLSCAASGRTFDINYMAWFRRAPGKERTFVAAVRWTDGMTYYTNSVKGRFAGSRDNAQNTVSLQMNSLKPEDSAVYYCAARRSGGELTNSDYWDYWGQGTQVTVSS

SEQ ID NO: 1385 - protein, 120 aa, synthetic construct
  REGION 1..120: note = Synthetic Construct
AHVQLVESGGGLVQAGGSLRLSCAASGRTFSSYAMGWFRQAPGKERAFVAAISTTAGTANYADSVKGRFTISRDNGKNTLYLQMNRLKPEDTAVYYCAARDPTSSNYDYWGQGTQVTVSS

SEQ ID NO: 1386 - protein, 127 aa, synthetic construct
  REGION 1..127: note = Synthetic Construct
AQVQLVESGGGLVQAGGSLRLSCAASGSTFNLNTIGWFRHAPGKEREFVGAFRWWNDGTRITYADSVKGRFTISRDNAKNTVFLQMNSLKAEDTAVYYCAARRGVTVTSSSSSFEYWGQGTQVTVSS

SEQ ID NO: 1387 - protein, 129 aa, synthetic construct
  REGION 1..129: note = Synthetic Construct
AHVQLVESGGGSVPPGGSLRLSCTASGFTLDYKAVGWFRQAPGKDREGLSCISGSGSTTNYADSVKGRFTISRENGKNTVSLQMNALRPEDTAVYYCATVSFGCPDGKEVVIAERTVYWGQGTQVTVSS

SEQ ID NO: 1388 - protein, 128 aa, synthetic construct
  REGION 1..128: note = Synthetic Construct
ADVQLVESGGGLVQAGGSLRLSCAATGRTFSSYAVGWFRQAPGKEREFVAAITRSGLSTHYADSVKGRFTISRDNTQNTVYLQMNALKPEDTAVYYCAADAVSSIYMYTMVENRYDYWGQGTQVTVSS

SEQ ID NO: 1389 - protein, 127 aa, synthetic construct
  REGION 1..127: note = Synthetic Construct
AHVQLVESGGGLVQAGGSLRLSCAASGDTFSRYAMGWFRQAPGKEREFVGAISRSGSTSYLDSVKGRFTISRDNAKNTVYLQMNSLKPEDTAVYSCAADLSGLWHGIPTTARQYDYWGQGTQVTVSS

SEQ ID NO: 1390 - protein, 125 aa, synthetic construct
  REGION 1..125: note = Synthetic Construct
AQVQLVESGGGLVQPGGSLRLSCTTSGFTLDHYAIGWFRQAPGKEREGVSWIFYSAATTYYADSVKGRFTAARDNAKNTVYLQMDNLKPEDTAVYYCARWRSGTSWSREEGYDYWGQGTQVTVSS

SEQ ID NO: 1391 - protein, 125 aa, synthetic construct
  REGION 1..125: note = Synthetic Construct
AEVQLVESGGGLVQAGGSLRLSCAASGFTFSNYAMAWFRQTPGKEREFVAEISRPGGMSDYADSVKGRFTISRDNAKNALYLQMNSLKPEDTAVYYCAADKWAVAHSDWSGYEYRGQGTQVTVSS

SEQ ID NO: 1392 - protein, 126 aa, synthetic construct
  REGION 1..126: note = Synthetic Construct
AQVQLVESGGGLVQAGGSLRLSCAASGRTFRSYNMGWFRQAPGKEREFVAALSWTGIGTYYADSVKGRFTISRDFAKNTVYLQMDSLKPEDTAVYYCAADSTTDRLHSAGTEYHYWGQGTQVTVSS

SEQ ID NO: 1393 - protein, 127 aa, synthetic construct
  REGION 1..127: note = Synthetic Construct
ADVQLVESGGGLVQAGGSLRLSCAASGRTFSNYAMGWFRQAPGKEREFVAVISRGGSTDYADSVKGRFTVSRDNAKNTLYLQMNSLKPEDTALYYCAADQSPLHFGVPRSRGQYDYWGQGTQVTVSS

SEQ ID NO: 1394 - protein, 126 aa, synthetic construct
  REGION 1..126: note = Synthetic Construct
AHVQLVESGGGLVQAGGSLRLTCAASGRTFSISTMDMGWFRQAPGKEREFVAADAWNDGRTYYADSVKGRFTISRDNAKNTLYLQMNSLKPEDTAVYYCTADTYSNYKKDDSWGYWGQGTQVTVSS

SEQ ID NO: 1395 - protein, 126 aa, synthetic construct
  REGION 1..126: note = Synthetic Construct
AQVQLVESGGGLVQPGGSLRLSCAASGRTFSSDTMDMGWFRQAPGKEREFVALHSWNGGKTYYADSVKGRFTISRDNAKNTLYLQMNNLKPEDTAVYYCAAETYTLYEKDSSWGYWGQGTQVTVSS

SEQ ID NO: 1396 - protein, 127 aa, synthetic construct
  REGION 1..127: note = Synthetic Construct
AHVQLVESGGGLVQAGGSLRLSCAASGRTYSSYRMGWFRQAPGKEREFVATINRSGDSTSYADSVKGRFTISRDNAKNTVYLQMNSLEPADTAVYYCAADLLPGTYLHTAQNAYGYWGQGTQVTVSS

SEQ ID NO: 1397 - protein, 122 aa, synthetic construct
  REGION 1..122: note = Synthetic Construct
AHVQLVESGGGLVQAGGSLRLSCAASGSIFSINAMGWYRQAPGNQRELVAGITRYRATVYAESVKGRFTISRDNARNTVYLQMNSLQPEDTAVYYCNAPFSMAVAGTGGPYWGQGTQVTVSS

SEQ ID NO: 1398 - protein, 131 aa, synthetic construct
  REGION 1..131: note = Synthetic Construct
AEVQLVESGGGLVQAGGSLRLSCAASGRTFSAYSMAWFRQAPAEEREFVAAFSKSPSTTRMTNYADSVKGRFTISRDNAKNTVYLQMDSLKPEDTAVYYCAAEEWGSGTIRPTSTSWYHYWGQGTQVTVSS

SEQ ID NO: 1399 - protein, 130 aa, synthetic construct
  REGION 1..130: note = Synthetic Construct
AHVQLVESGGGLVQAGGSLRLSCAASGRTFSSYAMGWFRQAPGKEREFVAAISVSGGSTGHADSVKGRFTISRDNAKNTVYLHMNSLKPEDTAVYYCATVTMGVYGINYYPTSARQYDTWGQGTQVTVSS

SEQ ID NO: 1400 - protein, 124 aa, synthetic construct
  REGION 1..124: note = Synthetic Construct
AHVQLVESGGGLVQAGGSLRLSCAASGSTFSINAIGWYRQAPGKQRELVATINSPGSTDYAESVKGRFTISRDNAKNTVFLQMNSLKPEDTAVYYCNTCKFRLSVLCHPGQDYWGQGTQVTVSS

SEQ ID NO: 1401 - protein, 119 aa, synthetic construct
  REGION 1..119: note = Synthetic Construct
AHVQLVESGGGLVQAGGSLRLSCVASGGTFGLYRMAWFRQDPGKEREFVAAISTTEITTNYADSVKGRFTISRDNAKNTVYLQMNSLKPEDTAVYYCAARTERGVYDYWGRGTQVTVSS

SEQ ID NO: 1402 - protein, 125 aa, synthetic construct
  REGION 1..125: note = Synthetic Construct
AHVQLVESGGGLVQAGDSLRLSCAASGRTFSNYAVGWFRLAPGEDREFVAAINWSGSERYSVDSVKGRFIISRDNAKNTVYLQMNSLKPEDTARYYCAARSAGNIDSRPGQYDDWGQGTQVTVSS

SEQ ID NO: 1403 - protein, 118 aa, synthetic construct
  REGION 1..118: note = Synthetic Construct
AEVQLVESGGGLVQAGGSLRLSCAASGITFSINTAGWYRQTPGKQRELVAAITRRGIKNYADFVKDRFTISGDNALNTVSLQMTSLKPEDTAVYYCRITGAFMKNDYWGQGTQVTVSS

SEQ ID NO: 1404 - protein, 121 aa, synthetic construct
  REGION 1..121: note = Synthetic Construct
AEVQLVESGGGLVQAGGSLRLSCAASRRTFSIYEMAWFRQAPGKERELVARFTWSGGSIYYADSVKGRFTISRDSAKNTVYLQMNSLQPADTAVYYCAADRLGSDPEYRYWGQGTQVTVSS

SEQ ID NO: 1405 - protein, 124 aa, synthetic construct
  REGION 1..124: note = Synthetic Construct
ADVQLVESGGGLVQAGDSLRLACAASGRTFGYYALGWFRQAPGKEREFVGSITQTGFGTKYADAVKGRFTISRDNAKNTMYLQMNSLKPEDTAVYYCAADPTAQNMGIRNPPYWGQGTQVTVSS

SEQ ID NO: 1406 - protein, 125 aa, synthetic construct
  REGION 1..125: note = Synthetic Construct
AHVQLVESGGGFVQPGGSLRLSCTTSGFTLDHYAIGWFRQAPGKEREGVSWIFYNDATTYYTDSVKGRFTASRDNAKNTVYLQMDSLKPEDTAVYYCARWRAGTSWSREEGYDYWGQGTQVTVSS

SEQ ID NO: 1407 - protein, 120 aa, synthetic construct
  REGION 1..120: note = Synthetic Construct
ADVQLVESGGGLVQPGGSLRLSCVASGSIFSFDSFDAMGWYRQAPGKQLELVARITHVGNTNYADSVKGRFTISRDNVKNTLYLQMNSLEPEDTAVYYCKGEPIIGSAYWGQGTQVTVSS

SEQ ID NO: 1408 - protein, 125 aa, synthetic construct
  REGION 1..125: note = Synthetic Construct
ADVQLVESGGGLVQAGGSLRLSCTASGFTFSNYAMAWFRQAPGKEREFVAEVSRPGGMTDYADSVKGRFTISRDNIKNVLYLQMNSLKPEDTAVYYCAADKWAVAHSDWARYDYWGQGTQVTVSS

SEQ ID NO: 1409 - protein, 126 aa, synthetic construct
  REGION 1..126: note = Synthetic Construct
AEVQLVESGGGLVQAGGSLKLSCAASGRTFSDYTIGWFRRTPGKEREFVAAISGSTESILYADSVKGRFTISRDNSQNTVYLQIHSLKPEDTAVYYCASPFTTMWPGALAKYYDYWGQGTQVTVSS

SEQ ID NO: 1410 - protein, 119 aa, synthetic construct
  REGION 1..119: note = Synthetic Construct
AEVQLVESGGGLVQAGGSLRLSCAASGSIFSILNMGWYRQAPGKQRDLVARITPGGSTDYADSVKGRFTISRDNAKNTLYLQMNSLKPEDTAVYLCYAKIFGPGSGSYWGQGTQVTVSS

SEQ ID NO: 1411 - protein, 125 aa, synthetic construct
  REGION 1..125: note = Synthetic Construct
AHVQLVESGGGVVQPGGSLRLSCVASGFTSDDHAVGWVRQAPGKEREGVSVIRWSDGSPYYGEPVKGRFTISRDKAKNTLYLQMNSLKPEDTAVYYCVVGAPGYYSASYLDYKYWGQGTQVTVSS

SEQ ID NO: 1412 - protein, 116 aa, synthetic construct
  REGION 1..116: note = Synthetic Construct
ADVQLVESGGGLVQAGGSLRLSCAVSGSTLGINAIGWYRQPPDKPRALVALISSAGRSTYGASVKGRFTISRDNAKNTVYLQMSSLKPDDTAVYYCYAVDDQMDYWGQGTQVTVSS

SEQ ID NO: 1413 - protein, 123 aa, synthetic construct
  REGION 1..123: note = Synthetic Construct
AHVQLVESGGGLVQAGGSLRLSCAASDGAFNYRMGWFRQAPGKEREFVATISWRGDSTDYGDSAKGRFTISRDNAKNAVTLQMNSLKPEDTAVYYCAADPRYDYYIASSYNYWGQGTQVTVSS

SEQ ID NO: 1414 - protein, 130 aa, synthetic construct
  REGION 1..130: note = Synthetic Construct
ADVQLVESGGGLVQPGGSLRLSCAASGFTFSTYAMSWVRQAPGKGREWVAGIQREGTETHYADSVKGRFTVSRDNAKNTVYLQMNSLKPEDTAVYYCAAAHARVYGANWSSSNPYDYDGWGQGTQVTVSS

SEQ ID NO: 1415 - protein, 120 aa, synthetic construct
  REGION 1..120: note = Synthetic Construct
AEVQLVESGGGLVQPGGSLRLSCAASGFTLDYYATGWFRQAPGKEREGVGCISSSDGNTYYADSVKGRFTISRDNAKNTVYLQMNSLKPEDTAVYYCAARDPETAEYTNWGQGTQVTVSS

SEQ ID NO: 1416 - protein, 130 aa, synthetic construct
  REGION 1..130: note = Synthetic Construct
AEVQLVESGGGLVQAGGSLSLSCAASGRTVSIWPMGWFRQVPGKEREFVAAISWSGGRTYYADSVKGRFTVSRDNAKGTSDLQMNSLKPEDTAVYYCAAAHGRVYGSMWYSSNRYDYSSWGQGTQVTVSS

SEQ ID NO: 1417 - protein, 119 aa, synthetic construct
  REGION 1..119: note = Synthetic Construct
ADVQLVESGGGLVQTGGSLRLSCVASGRTFDIQYMGWFRRAPGKEREFVASIDWDDRRAYYGDAVQGRFTISLDNDKNTLYLQMNNLRPEDTAVYYCRASPPGRDWDYWGQGTQVTVSS

SEQ ID NO: 1418 - protein, 128 aa, synthetic construct
  REGION 1..128: note = Synthetic Construct
AEVQLVESGGGLVQAGGSLRLSCAASGGTFSSYAMGWFRQAPGKEREFVGAISRSGGGTSYLDSVKGRFTISRDNAKNTVYLQMNSLKPEDTAVYYCAADLSALWHGIPTTARLFDSWGQGTQVTVSS

SEQ ID NO: 1419 - protein, 126 aa, synthetic construct
  REGION 1..126: note = Synthetic Construct
AEVQLVESGGGLVQPGGSLRLSCAASGDTLDYAGMGWFRQAPGKERELVAATRWSVSTTYYTDSVKGRFTISRDDAKRTVYLQMNSLKPEDTAVYYCAAQRSVHSRLYETALYDYWGQGTQVTVSS

SEQ ID NO: 1420 - protein, 120 aa, synthetic construct
  REGION 1..120: note = Synthetic Construct
ADVQLVESGGGLVQTGGSLRLSCAASGRTFDISYMGWFRRAPGKEREFVAAIGASGGMTNYLDSVKGRFTISRDNAKNTVYLQMNSLKPQDTAVYYCAARNIETAEYTYWGQGTQVTVSS

SEQ ID NO: 1421 - protein, 125 aa, synthetic construct
  REGION 1..125: note = Synthetic Construct
ADVQLVESGGGLVQAGGSLRLSCAASGRTFSNAFMGWFRQVPGKERAWVAAIRWSDGMVYYTNSVKGRFTVSRDSAQNTVSLQMNSLKPEDSAVYYCAARRSGGELTNTDHWDYWGQGTQVTVSS

SEQ ID NO: 1422 - protein, 118 aa, synthetic construct
  REGION 1..118: note = Synthetic Construct
ADVQLVESGGGLVQAGGSLRLSCAASGRTFRMGWFRQAPGKRREFVAAIGWDIRTTNYADSVKGRFTISGDGAKNTVYLQMTSLKSEDTAVYYCAARGTATSGEYDYWGQGTQVTVSS

SEQ ID NO: 1423 - protein, 128 aa, synthetic construct
  REGION 1..128: note = Synthetic Construct
AEVQLVESGGGLVQTGGSLRLSCAVSGYTFSTFPTAWFRQAPGKEREFVAGIRWNGGNRDYTEYADFVKGRFTISRDNAKNMVYLQMISLKPEDTALYYCAASDGVIDGTSANDYRYWGQGTQVTVSS

SEQ ID NO: 1424 - protein, 120 aa, synthetic construct
  REGION 1..120: note = Synthetic Construct
AEVQLVESGGGLVQAGGSLRLSCTASGSIFSSNAMSWYRQAPGKQRELVAGITSGGNANYEDSVKGRFTISRDKNTVYLEMSSLKPADTAVYYCNAVGQEGSARAPRAYWGRGTQVTVSS

SEQ ID NO: 1425 - protein, 125 aa, synthetic construct
  REGION 1..125: note = Synthetic Construct
AQVQLVESGGGLVQAGESLRLSCVASGLTFSTYTMGWFRQAPGKERDFVALIRWPFNRTSYAELLRGRFIISKDNAKNTVYLQMNSLKPEDTAVYYCAAAPTSPYATSTRDYTYWGQGTQVTVSS

SEQ ID NO: 1426 - protein, 126 aa, synthetic construct
  REGION 1..126: note = Synthetic Construct
AHVQLVESGGGLVQAGGSLRLSCAASGRSFSNYGMGWFRQAPGNEREFVAAVEQSGPDTFYAPSVKDRFTISRDNAKNTMYLQMNSLKPEDTAVYYCAAQGSYSYIRVRPGDYDYWGHGTQVTVSS

SEQ ID NO: 1427 - protein, 128 aa, synthetic construct
  REGION 1..128: note = Synthetic Construct
AQVQLVESGGGLVQPGGSLRLSCAASGFTFSMSVMSWVRQAPGKGREWVSGIASDGSDTDYADTVKGRFTISRDNAKNTLYLQMSSLKPEDTARYYCAKTLREYYSGRSTDARAYDYWGQGTQVTVSS

SEQ ID NO: 1428 - protein, 120 aa, synthetic construct
  REGION 1..120: note = Synthetic Construct
AEVQLVESGGGLVQAGGSLELSCAASGSIFSSNAMSWYRQAPGKQRELVASITSGGNADYEDSVKGRFTISRDKNTVYLEMSSLKPADTAVYYCHAVGQEGSSYAPRAYWGQGTQVTVSS

SEQ ID NO: 1429 - protein, 129 aa, synthetic construct
  REGION 1..129: note = Synthetic Construct
ADVQLVESGGGLVQPGGSLRLSCAASTITLDDYGIGWFRQGPGKERERVACWSRYDGRTYYADSVKGRFTISRDNAKNTVYLQMNNLKEEDTAVYYCAAPLKIDYAIGRCLTTMPGITWGQGTQVTVSS

SEQ ID NO: 1430 - protein, 126 aa, synthetic construct
  REGION 1..126: note = Synthetic Construct
AQVQLVESGGGLVQAGGSLRLSCAVSGRTFSSYGMAWFRQAPGKERDFVGTITRDGDTLYAASVKGRFTISRDNAKNTVYLQMNSLKIEDTALYYCAVRRDSSWGYSRDLFEYDYWGQGTQVTVSS

SEQ ID NO: 1431 - protein, 125 aa, synthetic construct
  REGION 1..125: note = Synthetic Construct
ADVQLVESGGGLVQAGGSLRLSCAASGRTLNYYFMGWFRQAPGKEREVVAIISATTYGTYYSDFVKGRFTISRDNAKNTVYLQMNSLKPEDTAVYYCNTCKFRLSLLCHPGQDYWGQGTQVTVSS

SEQ ID NO: 1432 - protein, 126 aa, synthetic construct
  REGION 1..126: note = Synthetic Construct
AQVQLVESGGGLVQAGGSLRLTCAASGRTFSSSTMDMGWFRQAPGKEREFVAVDAWNDGRTYYADSVKGRFTISRDNAKNTLYLQMTSLKPEDTAVYYCAAETYSNYEKDDSCGYWGQGTQVTVSS

SEQ ID NO: 1433 - protein, 124 aa, synthetic construct
  REGION 1..124: note = Synthetic Construct
ADVQLVESGGGLVQAGGTLRLSCAASGLILSRYGMGWFRQAPGKEREFVAAISWSGSSNDYADSVKGRFTISRDNAKNTVYLQMNSLKPEDTAVYFCAADGKGGGRYSYRYDYWGQGTQVTVSS

SEQ ID NO: 1434 - protein, 127 aa, synthetic construct
  REGION 1..127: note = Synthetic Construct
ADVQLVESGGGLVQAGGSLRLSCAASGRTSSSYSMGWFRQAQGKEREFVAAINWNDGDTYYTTSVKGRFTISRDDATNTVYLQMNSLKPEDTAIYYCAADKDVYYGYTSFPNEYEYWGQGTQVTVSS

SEQ ID NO: 1435 - protein, 128 aa, synthetic construct
  REGION 1..128: note = Synthetic Construct
AEVQLVESGGGLVHAGGSLRLSCAASGRTLMNYHMGWLRQAPGKEREFVAAITWNGDTTEYADSVKGRFTISRDNAKNMVSLQMNSLKPEDTGVYYCAAARPSYGSPLQRQPSGYDYWGQGTQVTVSS

SEQ ID NO: 1436 - protein, 129 aa, synthetic construct
  REGION 1..129: note = Synthetic Construct
AQVQLVESGGGLVQAGGSLRLTCAASGGTFSTSTMDMGWFRQAPGKEREFVAATAWSGGPSYYTHSVKGRFTISRDSAKNTVYLQMNSLQPEDTAVYHCAADLDPDWYLQDFPNTYDYWGQGTQVTVSS

SEQ ID NO: 1437 - protein, 118 aa, synthetic construct
  REGION 1..118: note = Synthetic Construct
AEVQLVESGGGLVQAGGSLRLSCAVSGASAERVGWFRRAPGKEREFVAAIGANGGSTNYLDSVKGRFTISRDNAKNTVYLQMNSLKPQDTAVYYCAARNLETFDYTYWGQGTQVTVSS

SEQ ID NO: 1438 - protein, 126 aa, synthetic construct
  REGION 1..126: note = Synthetic Construct
AHVQLVESGGGLVQAGGSLRLTCAASGGTFSTSTMDMGWFRQAPGKEREFVAVDSWNDGRAYYADSVKGRFTISRDSAKTTLYLQMNSLKPEDTAVYYCAAETYSNYEKDYSRGYWGQGTQVTVSS

SEQ ID NO: 1439 - protein, 127 aa, synthetic construct
  REGION 1..127: note = Synthetic Construct
AQVQLVESGGGLVQPGGSLRLSCAASGGTFSSYGMAWFRQTPGKEREFVASISASGDKTDYENFAKGRFAISRDNAKNTVYLQMNNLKPEDTAVYYCAASYYSGSQRFPRLIDYDFWGQGTQVTVSS

SEQ ID NO: 1440 - protein, 125 aa, synthetic construct
  REGION 1..125: note = Synthetic Construct
AQVQLVESGGGLVQAGGSLRLSCAASGRTFSSYTMGWFRQAPGKQREVVAVVSGGGTTYYADSAKGRFTISRTISTDNAKTMVYLQMNNLKPEDTAAYYCNIHAGNTLYRSGPYWGQGTQVTVSS

SEQ ID NO: 1441 - protein, 126 aa, synthetic construct
  REGION 1..126: note = Synthetic Construct
AHVQLVESGGGLVQAGGSLRLSCAASGFTFSSSAMTWVRQAPGKKREWVAGIQREGTETNYADSVKGRFTISRDNVKNMVYLQMNSLKPEDTALYYCAKVLGRPYGSSWLDDMDYWGRGTQVTVSS

SEQ ID NO: 1442 - protein, 126 aa, synthetic construct
  REGION 1..126: note = Synthetic Construct
ADVQLVESGGGLVQAGGSLRLSCAASGRTLRTYNMGWFRQAPGKEREFVAAISWTGIGTYYADSVKGRFTISRDVIKNTLYLQMDSLKPEDAAVYYCAADSTTDRLHSAGSDYHYWGQGTQVTVSS

SEQ ID NO: 1443 - protein, 126 aa, synthetic construct
  REGION 1..126: note = Synthetic Construct
AEVQLVESGGGLVQAGGSLRLSCVASGRALRSYNMGWFRQAPGKEREFVAASSWTGVGTYYADSVKGRFTISRDNNKNTLYLQMDSLKPEDTAVYYCAADSNIDRLHSAGSDYRYWGQGTQVTVSS

SEQ ID NO: 1444 - protein, 125 aa, synthetic construct
  REGION 1..125: note = Synthetic Construct
ADVQLVESGGGFVQAGGSLRLACAGSGGTFSSYIMAWFHQAPGKEREFIAGISKSGSDTYYADSVKGRFTISRDNAKNTVYLQMNSLKPEDTAVYYCAARGGPLITTSRLHYDFWGQGTQVTVSS

SEQ ID NO: 1445 - protein, 122 aa, synthetic construct
  REGION 1..122: note = Synthetic Construct
ADVQLVESGGGLVQAGGSLRLSCAASGGTLHRNPMGWFRQAPGKDREFVAGIDRSGGSRRYADSVQGRFTISRDDAKNTVYLQMTSLKPEDTAVYYCAAGIYGSYWKDYPYRGQGTQVTVSS

SEQ ID NO: 1446 - protein, 127 aa, synthetic construct
  REGION 1..127: note = Synthetic Construct
AEVQLVESGGGLVQAGGSLRLSCAASGRTLMNYHMGWFRQAPGKEREFVAAITWNGDATDYADSKKGRFTISRDNAKNMVSLQMNSLKPEDTGVYYCAASRPSYGSPLQRQPSGYDYWGQGPRSPSS

SEQ ID NO: 1447 - protein, 117 aa, synthetic construct
  REGION 1..117: note = Synthetic Construct
AEVQLVESGGGLVQAGGSLRLSCVASGSGFEPNAMGWYRQAPGKQRELVAGITSGGNANYADSVKGRFTISRDNAQNTVYLQMNSLKPEDTAVYYCNAAPIIGSTYWGQGTQVTVSS

SEQ ID NO: 1448 - protein, 130 aa, synthetic construct
  REGION 1..130: note = Synthetic Construct
AQVQLVESGGGLVAAGGSLRLSCAASGRTFSTHATGWFRQAPGKEREFLATSVWLDDISRDSTYYAESVKGRFSISRDNAKDTVYLQMNTLKPEDTAVYYCAVKQRVGPGIMSALTYDYWGQGTQVTVSS

SEQ ID NO: 1449 - protein, 128 aa, synthetic construct
  REGION 1..128: note = Synthetic Construct
AHVQLVESGGGLVQAGGSLRLSCAASGRTFSSYSMGWFRQAPGKEREFVAFIRWSGTSTYYADSVKGRFTISRDNAKNTVYLQMNSLKPDDTAVYYCAASSRTMNTISQTMRINWDYWGQGTQVTVSS

SEQ ID NO: 1450 - protein, 125 aa, synthetic construct
  REGION 1..125: note = Synthetic Construct
AHVQLVESGGGLVQAGGSLRLSCAASGRTFSNSHMGWFRQAPGKEREFVAVISRSGVSTLYGDSVTGRFTISRDNAKNTVYLQMNSLKPEDTAVYYCAASRTAGLTSNPSLYDYWGQGTQVTVSS

SEQ ID NO: 1451 - protein, 125 aa, synthetic construct
  REGION 1..125: note = Synthetic Construct
AHVQLVESGGGLVEAGGSLRLSCAASGLTFSSYTMGWFRQAPGTERDFVGLIRWPFNRTSYADLTKGRFIISKDNNKNTVYLQMNSLKPEDTAVYYCAAAPTSPYATSTRDYAYWGQGTQVTVSS

SEQ ID NO: 1452 - protein, 117 aa, synthetic construct
  REGION 1..117: note = Synthetic Construct
ADVQLVESGGGLVQAGGSLRLSCAVSGSTLGINAIGWYRQPPGKQRELVASISSLGTTLYAESVKGRFAISRDNAKNTAYLQMNSLKPDDTAVYYCNMRTPYMRDLWGQGTQVTVSS

SEQ ID NO: 1453 - protein, 123 aa, synthetic construct
  REGION 1..123: note = Synthetic Construct
ADVQLVESGGGLVQAGGSLRLSCAASGRTFSSHAMAWFRQAPGKEREFVAGISWSGPYYVDSVKGRFTISADNAKNIVYLQMNSLTPEDTAVYYCASNRGPNLYPHIGDIEYWGQGTQVTVSS

SEQ ID NO: 1454 - protein, 116 aa, synthetic construct
  REGION 1..116: note = Synthetic Construct
AHVQLVESGGGLVQPGGSLRLSCAASGSTRSIWYSGWYRQAPGKQRELVASLTSGGTTYYPDSMKGRFTISGSSGLNMVYLQMNSLRPEDTAVYSCNVRTGSGVYWGQGTQVTVSS

SEQ ID NO: 1455 - protein, 129 aa, synthetic construct
  REGION 1..129: note = Synthetic Construct
AEVQLVESGGGLVQAGGSLRLSCAASGRSFSRYAMAWFRQAPGKEREFVAGISRSGVMQRYGDFVKDRFTISRDNAKNTVYLQMNSLKPEDTAVYHCAAAEASGITTVIENIASGYTYWGQGTQVTVSS

SEQ ID NO: 1456 - protein, 126 aa, synthetic construct
  REGION 1..126: note = Synthetic Construct
ADVQLVESGGGLVAAGGSLRLSCAASGFTFGSSAMTWFRQAPGKGREWVAGIQREGTETNYADSVKGRFTISRDNAKKMLYLQMNSLRPEDTALYFCAKVLGRPYGSHWLDDMDYWGRGTQVTVSS

SEQ ID NO: 1457 - protein, 126 aa, synthetic construct
  REGION 1..126: note = Synthetic Construct
ADVQLVESGGGLVQPGGSLRLSCVASGFTFTNSAMSWVRQGPGKGREWVSGIQREGTETEYADSVKGRFTISRDNAKNIVYLQMNNLKPEDTGLYYCAKVLGRPYRSHWLDDIHYSGKGTQVTVSS

SEQ ID NO: 1458 - protein, 130 aa, synthetic construct
  REGION 1..130: note = Synthetic Construct
AQVQLVESGGGLVQAGGSLRLSCAVSGRTGSRYPMGWFRQAPGKEREFVATISWSDSRTYYADSVKGRFTISRDNAKNTVFLQMASLKPEDTAVYYCAAAHARVYGANWSSSNRYDYDYWGQGTQVTVSS

SEQ ID NO: 1459 - protein, 127 aa, synthetic construct
  REGION 1..127: note = Synthetic Construct
AHVQLVESGGGLVQPGGSLRLSCATSGFIVRGYAIAWFRQAPGKEREKISCITGVEDNTDYADSVKGRFTVSRDNAKSTVYLQMDSLKPEDTAVYYCATDLRRRCPSRTTYSDLDYWGKGTQVTVSS

SEQ ID NO: 1460 - protein, 130 aa, synthetic construct
  REGION 1..130: note = Synthetic Construct
AHVQLVESGGGLVQPGGSLRLSCTASRITLDSYAVNWFRQAPGKEREGVSCISRNNENTYYADSVKGRFTVSKDNAKNIVYLQMNSLKPEDTAVYYCATGGAYYNTDCSHPPVEHGLNYWGKGTQVTVSS

SEQ ID NO: 1461 - protein, 123 aa, synthetic construct
  REGION 1..123: note = Synthetic Construct
ADVQLVESGGGLVQAGGSLRLSCAASGRTFSSYTMGWFRQAPGKEREFVAAIGWNAYSVLYADSVKGRFTISRDNAKNTVYLQMNSLKPEDTAIYYCAARSTSAVGYNQYNYWGQGTQVTVSS

SEQ ID NO: 1462 - protein, 126 aa, synthetic construct
  REGION 1..126: note = Synthetic Construct
AEVQLVESGGGSVQPGSSLTLSCATSGFTFRTYAMAWVRQAPGKGREWVAGIQREGTETNYADSVKGRFTVSRDNGKNMLYLQMNSLKPEDTALYYCAKVLGRPYGSHWLSDIDARGKGTQVTVSS

SEQ ID NO: 1463 - protein, 125 aa, synthetic construct
  REGION 1..125: note = Synthetic Construct
AEVQLVESGGGLVQTGDSLELSCAASGRTFDISYMGWFRRAPGKERDFVCTIKWSGDDAYCGDSVKGRFSISRDNAKNTVYLQMNSLKPEDTAVYYCAARLFPGIATFSLDYSSWGQGTQVTVSS

SEQ ID NO: 1464 - protein, 123 aa, synthetic construct
  REGION 1..123: note = Synthetic Construct
ADVQLVESGGGLVQAGGSLRLSCAVSGRTFSFATVAWFRQAPGKERGFVAGVTWNDGSPYYADSVEGRFTISRDNAKSAVYLQMNSLKPEDTAIYYCATTQTLATRVSAFDYWGQGTQVTVSS

SEQ ID NO: 1465 - protein, 129 aa, synthetic construct
  REGION 1..129: note = Synthetic Construct
AHVQLVESGGGLVQAGDSLRLSCTASERTGINYAMGWFRQAPGKERDFVAAIGWNGSIKKYAESVKGRFTISISRDDAKNTVSLQMNSLKPEDTAVYYCAARVGSIAGLQYREYEFAYWGQGTQVTVSS

SEQ ID NO: 1466 - protein, 124 aa, synthetic construct
  REGION 1..124: note = Synthetic Construct
AQVQLVESGGGLVQAGGSLRLSCAASGRTFNGLTMGWFRQAPGKEREFVATISWRGGITYYSDSVKGRFSTSRDNAKNMVYLQMTSLKPEDTAVYYCAATNTDYETDRRGYGDWGQGTQVTVSS

SEQ ID NO: 1467 - protein, 123 aa, synthetic construct
  REGION 1..123: note = Synthetic Construct
AHVQLVESGGGLVHAGGSLRLSCAASGRTLMNYHMGWLRQAPGKEREFVAGIRWVFGTTGYADSVKGRFAISKDNVKKTVYLQMNNLKPEDTAVYFCAMQMGVRPLMGDYDYWGQGTQVTVSS

SEQ ID NO: 1468 - protein, 124 aa, synthetic construct
  REGION 1..124: note = Synthetic Construct
AHVQLVESGGGLVQAGGSLRLSCAASGRTVSTYAIGWFRQAPGKEREFVATTRWGGYMVYYADSVKGRFTISRDNAKNTVYLQMNSLKPEDTAVYYCAARQGHGTTISKEYDYWGQGTQVTVSS

SEQ ID NO: 1469 - protein, 127 aa, synthetic construct
  REGION 1..127: note = Synthetic Construct
ADVQLVESGGGLVQAGDSLRLSCTASGRTFSAYGMGWFRQAPGKEREFVAGIARSGSEFYGDSVKGRFTISRDNAKNTVYLQMARLKAEDTGVYYCAADPTILYHAISERTQNYRYWGPGTQVTVSS

SEQ ID NO: 1470 - protein, 122 aa, synthetic construct
  REGION 1..122: note = Synthetic Construct
AEVQLVESGGGLVQAGGSLRLSCAASGSGFSSNHMAWYRQAPGKQRELVAGITSGGNTNYADSVKGRFTISRDNTENTVYLQMNSLKPEDTAVYYCNTVAPVEATGRIRAYWGQGTQVTVSS

SEQ ID NO: 1471 - protein, 128 aa, synthetic construct
  REGION 1..128: note = Synthetic Construct
AHVQLVESGGGLVQAGGSLRLSCAASGRTFSSYNMGWFRQAPGKEREFVATLSWTGVGTYYTDSVKGRFTISRDNAKNTVYLQMNSLKPEDTAVYYCAAPGTPYSGRLYSNDYEYNYWGQGTQVTVSS

SEQ ID NO: 1472 - protein, 120 aa, synthetic construct
  REGION 1..120: note = Synthetic Construct
AEVQLVESGGGLVQAGGSLRLSCVASTNIFSANAMGWYRQVPGKQRELVAGITSGGNTNYADFVKGRFTISRDNAKNAVYLQMNSLKPEDTAVYYCQGPACSGSGCRNYWGQGTQVTVSS

SEQ ID NO: 1473 - protein, 126 aa, synthetic construct
  REGION 1..126: note = Synthetic Construct
AQVQLVESGGGLVQAGGSLRLTCAASGGTFSTSTMDMGWFRQAPGKEREFVALDSWNGGRTYYADSVKGRFTISRDNAKNTLYLQMNSLKPEDTAVYYCAADTYSNYEKDDSWGYWGQGTQVTVSS

SEQ ID NO: 1474 - protein, 124 aa, synthetic construct
  REGION 1..124: note = Synthetic Construct
AEVQLVESGGGLAQSGDSLRLSCAASGRTFDINYMAWFRRAPGKEREFVAVHSWNGGRTYYANSVKGRFTISRDNAKNTLYLQLNSLKPEDTAVYYCAADSYSIYEKDDSWGYWGQGTQVTVSS

SEQ ID NO: 1475 - protein, 123 aa, synthetic construct
  REGION 1..123: note = Synthetic Construct
ADVQLVESGGGLVQAGASLRLSCAAPGRTFSTSAMGWFRQAPGKEREFVAAIDWSNTIIHYADTVKGRFTISTDTAKNTVYLQMNNLKPEDTAVYYCAQGGWGLTQPISVDYWGKGTQVTVSS

SEQ ID NO: 1476 - protein, 131 aa, synthetic construct
  REGION 1..131: note = Synthetic Construct
AHVQLVESGGGLVQPGGSLRLSCAAAGFTLDYYAIGWFRQAPGKEREGVSCISSSDGSTNYADSVKGRFTISRDNAKNTVYLQMNSLKPEDTAVYYCATGALTYYSGTYYLTCHPHAMDYWGKGTQVTVSS

SEQ ID NO: 1477 - protein, 127 aa, synthetic construct
  REGION 1..127: note = Synthetic Construct
AHVQLVESGGGLVQAGGSLRLSCAASGGNWPTGWFRQAPGKEREFVAAISWSGGSTYYADSVKGRFTISRDNAKATVDLQMNSLKPEDTAVYYCAAAHGRVYGSTWYSSNRYDYSAWGQGTQVTVSS

SEQ ID NO: 1478 - protein, 125 aa, synthetic construct
  REGION 1..125: note = Synthetic Construct
ADVQLVESGGGLVQAGGSLRLSCAVSGSTLGINAIGWYRQPPGKQRELVASISSLGTTLYAESVKGRFAISRDNAKNTLYLQMNNLKPEDTARYYCAKVLGRPYGTRWLDDIDSWGRGTQVTVSS

SEQ ID NO: 1479 - protein, 126 aa, synthetic construct
  REGION 1..126: note = Synthetic Construct
AQVQLVESGGGLVQPGGSLRLSCAASGFTFSNSAMSWVRQAPGKGREWVSGIQREGTETEYADSVKGRFTISRDNAKNTLYLQMNSLKTEDTARYFCAKVLGRPYGNHWLDDIHYEGKGTQVTVSS

SEQ ID NO: 1480 - protein, 125 aa, synthetic construct
  REGION 1..125: note = Synthetic Construct
AHVQLVESGGGLVQPGGSLRLSCTASGSIANHDAIGWFRQATGKEREGVSCIDISDGRTYYANSVKGRFTISRDNAKNTVHLQMNSLKPEDTAVYACSTSCAVPGRRVVSSRDSWGRGTQVTVSS

SEQ ID NO: 1481 - protein, 125 aa, synthetic construct
  REGION 1..125: note = Synthetic Construct
AEVQLVESGGGLAQSGDSLRLSCAASGRTFDINYMAWFRRAPGKEREFVCTTKWRGEDTYCDGSVQGRFTISRDNAKNSVYLQMDSLRPEDTAVYYCAARLYPGIATSSIDYSSWGQGTQVTVSS

SEQ ID NO: 1482 - protein, 122 aa, synthetic construct
  REGION 1..122: note = Synthetic Construct
AHVQLVESGGGLAQSGDSLRLSCAASGRTFDINYMAWFRRAPGKEREFVCTTKWRGEDTYCDGSVQGRFTISRDNARNTVYLQMNSLKPEDTAVYTCAAGRIVASNADYDYWGRGTQVTVSS

SEQ ID NO: 1483 - protein, 129 aa, synthetic construct
  REGION 1..129: note = Synthetic Construct
ADVQLVESGGGLVQAGGSLRLSCASSGGAFSRITMGWFRQAPGKEREFVAAIRWTGTSTFYADSVKGRFAISRDNARNVVYLQMNSLTPEDTAVYYCAAAERTYSVGSIYYTEHPYDYWGQGTQVTVSS

SEQ ID NO: 1484 - protein, 130 aa, synthetic construct
  REGION 1..130: note = Synthetic Construct
ADVQLVESGGGLVQAGGSLRLSCAASGRTFSTHATGWFRQAPGKEREFLATSVWLDDISRDSTYYAESVKGRFSISRDNAKDTVYLQMNSLKPEDTAVYYCAVKQRVGPGIMSAPTYDYWGQGTQVTVSS

SEQ ID NO: 1485 - protein, 130 aa, synthetic construct
  REGION 1..130: note = Synthetic Construct
AEVQLVESGGGLVQTGGSLRLSCAASGRTFDISYMGWFRRAPGKEREGVSCISSGDGSTVYADSVKGRFTISRDNAKNTVYLQMNSLKPQDTAVYYCATFSGRSQYYCSGYESLRHYDYWGQGTQVTVSS

SEQ ID NO: 1486 - protein, 130 aa, synthetic construct
  REGION 1..130: note = Synthetic Construct
AEVQLVESGGGLVQAGGSLRLSCAASADTISNWPMAWFRQAPGKEREFVAAISWSGSTTYYADSVKGRFTMSRDNAKATADLQMNSLKPEDTAVYYCAAAHGRVYGSRWFSSDGYDYPSWGQGTQVTVSS

SEQ ID NO: 1487 - protein, 126 aa, synthetic construct
  REGION 1..126: note = Synthetic Construct
AEVQLVESGGGLVQAGGSLRLSCAASGFTFSTYAMSWVRQAPGKGQEWVAGIHREGTDMNYADSVKGRFTISRDNAKSTVYLQMNNLKPEDTGMYYCTKVLGRPYGRTWLDDVDVWGKGTQVTVSS

SEQ ID NO: 1488 - protein, 127 aa, synthetic construct
  REGION 1..127: note = Synthetic Construct
AQVQLVESGGGLVQAGGSLRLTCAASGGTFSTSTMDMGWFRQAPGKEREFVAVDSWNDGRAYYADSVKGRFTISRDDAKNTAYLQMNSLKPEDTAVYYCKMGIGDYMRDPYREVDYWGQGTQVTVSS

SEQ ID NO: 1489 - protein, 128 aa, synthetic construct
  REGION 1..128: note = Synthetic Construct
ADVQLVESGGGLVQAGGSLRLSCAASGGTFSSYAMGWFRQTPGKEREFVGAISRSGGGTSYLDSVKGRFTISRDNAKNTMYLQMNSLKPEDTAVYYCAADLSALWHGVPTTARLYDSWGQGTQVTVSS

SEQ ID NO: 1490 - protein, 119 aa, synthetic construct
  REGION 1..119: note = Synthetic Construct
AHVQLVESGGGLVQAGGSLRLSCAASGTSFRFSAIDWYRQAPGQQREFVASISTSGRISYGHFVKGRFTISRDNAKNTMYLQMNSLKPEDTAVYYCHLAQPDVFGGGTSGARGPRSPSS

SEQ ID NO: 1491 - protein, 128 aa, synthetic construct
  REGION 1..128: note = Synthetic Construct
AQVQLVESGGGLVQAGGSLRLSCAASGRTFSGYAMGWFRQAPGKEREFVAAISPSGIVTRYADSAKGRFTMSRHNGQNTVYLQMSSLKPEDTAVYYCAADSRLRGAGLSTTDLEYDYWGQGTQVTVSS

SEQ ID NO: 1492 - protein, 123 aa, synthetic construct
  REGION 1..123: note = Synthetic Construct
AHVQLVESGGGLVQTGGSLRLSCAASGRTFDINYMGWFRRAPGKEREFVCTIKWSGEERYCADSGRFTISRDNAKNTVYLQMNSLTPEDTAVYYCAARVFPGIATSSIDYSSWGQGTQVTVSS

SEQ ID NO: 1493 - protein, 128 aa, synthetic construct
  REGION 1..128: note = Synthetic Construct
AHVQLVESGGGLVQAGGSLRLSCAASGRTLMNYHMGWLRQAPGKEREFVAAITWNGDTTEYADSVKGRFTISRDNAKNMVSLQMNSLKPEDTGVYYCAASRPSYGSTLQRQPSGYDYWGQGTQVTVSS

SEQ ID NO: 1494 - protein, 130 aa, synthetic construct
  REGION 1..130: note = Synthetic Construct
AEVQLVESGGGLVQAGNSLRLSCAASGRTFSTWPMGWFRQAPGKERDFVAAISWSGDTTYYTDSVKGRFTISRDNAKNTVYLQMNSLKPEDTAVYYCGVSYGNVYGRSWIGRNIHDYDQWGQGTQVTVSS

SEQ ID NO: 1495 - protein, 122 aa, synthetic construct
  REGION 1..122: note = Synthetic Construct
AHVQLVESGGGLVQAGGSLRLSCAASGRDFSSTVMGWFRQAPGKERELVAWMTVTYDITYYADSVKGRFTISKDNAKNAVYLQMNSLKPDDTAVYYCASGALRVGSFSPDYWGQGTQVTVSS

SEQ ID NO: 1496 - protein, 118 aa, synthetic construct
  REGION 1..118: note = Synthetic Construct
AEVQLVESGGGLVQAGGSLRLSCAASGSIFSILNMGWYRQAPGKQRDLVARITPGGSTDYADSVKGRFTISRDNAKNTLYLQMNSLKPGDTAVYYCHAVDVSVGGDYWGQGTQVTVSS

SEQ ID NO: 1497 - protein, 119 aa, synthetic construct
  REGION 1..119: note = Synthetic Construct
AHVQLVESGGGLVQPGASLRLSCAASGRTFSSARMGWFRQAPGKEREFVAAVFWGDGHPQYADSVKGRFTISTDTAKNTVYLQMSSLKPEDTAIYYCAARSASGRYDWWGQGTQVTVSS

SEQ ID NO: 1498 - protein, 123 aa, synthetic construct
  REGION 1..123: note = Synthetic Construct
ADVQLVESGGGLVQAGDSPRLSCAASGRDFSSYAMGWFRQAPGKEREFVGVISSGDVGTFYEDSVKGRFIISRDDAKNTVDLQMNSLKPEDTAVYYCAAALYVTSTRGSYDYWGQGTQVTVSS

SEQ ID NO: 1499 - protein, 128 aa, synthetic construct
  REGION 1..128: note = Synthetic Construct
AEVQLVESGGGLVQAGGSLRLSCAASGRTFSSYSMGWFRQAPGKEREFVAFIRWSGTSTYYADSVKGRFTISRDNAKNTVYLQMNSLKPDDTAVYYCAATSRTMNTISQTMRINWEYWGQGTQVTVSS

SEQ ID NO: 1500 - protein, 125 aa, synthetic construct
  REGION 1..125: note = Synthetic Construct
ADVQLVESGGGLVQPGGSLRLSCAASGRTFGTYTMGWFRQAPGKEREFVALKWSSDILYADSVKGRFAISRDNAKNMVYLQMNSLKPEDTAVYYCAAARWSYNKHYYNRDEYDFWGQGTQVTVSS

SEQ ID NO: 1501 - protein, 125 aa, synthetic construct
  REGION 1..125: note = Synthetic Construct
AHVQLVESGGGLVQAGDSLRLSCAASGRMFSIYRLGWFRQAPGKEREFVAAITWSSGGTFYSDSVKGRFTMSRDLALNTAYLQMNSLKPEDTAVYYCAAHPPSEISNSQASYVYWGQGTQVTVSS

SEQ ID NO: 1502 - protein, 118 aa, synthetic construct
  REGION 1..118: note = Synthetic Construct
AQVQLVESGGGLAQSGDSLRLSCAASGRTFDINYMAWFRRAPGKEREFVAASSWGFVNYADPVKGRFTISRDNAKNTVYLEMSSLKTEDTAVYYCAARNPGTGQYDYWGQGTQVTVSS

SEQ ID NO: 1503 - protein, 127 aa, synthetic construct
  REGION 1..127: note = Synthetic Construct
ADVQLVESGGGLVQPGGSLRLSCAASEFSLDYDSIGWFRQAPGKEREGVSCISRRDGSLYYGDSVKGRFTISRDNAKNTVYLQMNSLKPEDTAIYYCATTPHLDGSEYCVSDYFDSWGQGTQVTVSS

SEQ ID NO: 1504 - protein, 122 aa, synthetic construct
  REGION 1..122: note = Synthetic Construct
AQVQLVESGGGLVQAGGSLRLSCAASGSDFSILAIGWYRQAPGKQRELVAAISRVGSTNYADSVKGRFTISRDNAKNTVSLQMNSLKPEDTAVYYCNAGIPMSTVLLGQGFWGQGTQVTVSS

SEQ ID NO: 1505 - protein, 126 aa, synthetic construct
  REGION 1..126: note = Synthetic Construct
AQVQLVESGGGLVQAGGSLRLSCAASGRTASSYVMAWFRQAAGKEREFVAHISWSGDDTNIADSVRGRFTISRDNAKNTVYLQMNSLKPEDTAVYYCAADRGYSLTYYSSREYAYWGQGTQVTVSS

SEQ ID NO: 1506 - protein, 117 aa, synthetic construct
  REGION 1..117: note = Synthetic Construct
ADVQLVESGGGLVQAGGSLRLACTASGSTISANAIGWFRQAPGKQRELVASISSSGITNYANSLKGRFTISRDNAKNTVYLQMNSLKPEDTAVYYCTHLSASGLSSWGRGTQVTVSS

SEQ ID NO: 1507 - protein, 128 aa, synthetic construct
  REGION 1..128: note = Synthetic Construct
ADVQLVESGGGLVQAGGSLRLSCAASGLTFSSYTMGWFRQAPGKEREFVAFIRWSGSSTYYADSVKGRFTISRDTAKNTVYLQMNSLKLEDTAVYYCAATSRTMIHTSQTMRINWDYWGQGTQVTVSS

SEQ ID NO: 1508 - protein, 126 aa, synthetic construct
  REGION 1..126: note = Synthetic Construct
AQVQLVESGGGLVQAGGSLRLTCAASGGTFSTSTMDMGWFRQAPGKEREFVAVDAWNDGRTYYADSVKGRFTISRDNAKNTLYLQMNSLKPEDTAVYYCAAETYSNYEKEYSWGYWGQGTQVTVSS

SEQ ID NO: 1509 - protein, 126 aa, synthetic construct
  REGION 1..126: note = Synthetic Construct
ADVQLVESGGGLVHPGGSLRLSCAASGFTFSTYAMSWVRQAPGKGREWVAGIQREGTETNYADSVKGRFTISRDNAKNTLYLQMNNLKPEDTALYYCAKVLGRPYGSRWLEDMDAWGRGTQVTVSS

SEQ ID NO: 1510 - protein, 118 aa, synthetic construct
  REGION 1..118: note = Synthetic Construct
ADVQLVESGGGLVQAGGSLRLSCAASGSIFSANVMGWYRQTPGKQRELVASITNTGTAYYTDSVKGRFAISRDNGKNTVYLQMNSLKPEDAAVYVRNAYDLRDRLQWWGQGTQVTVSS

SEQ ID NO: 1511 - protein, 124 aa, synthetic construct
  REGION 1..124: note = Synthetic Construct
AHVQLVESGGGSVQAGGSLRLSCASSSGTLFTRTTMGWYRQAPGKEYEWVAAVTKNGDTMYSDAVKGRFTISRDNAKNSLYLQMNSLKPEDTAVYYCRHVGTKVGETWMPFGSRGQGTQVTVSS

SEQ ID NO: 1512 - protein, 120 aa, synthetic construct
  REGION 1..120: note = Synthetic Construct
AQVQLVESGGGLVQAGGSLRLSCVASGSGFEPNAMGWYRQAPGKQRELVAGITSGGNANYADSVKGRFTISRAADRNTVDLQMNSLKPEDTAVYYCNARVNPVPVVGPYWGHGTQVTVSS

SEQ ID NO: 1513 - protein, 123 aa, synthetic construct
  REGION 1..123: note = Synthetic Construct
AHVQLVESGGGLVQAGGSLRLSCAASGRTLYTNAMGWFRQAPGKEREFVAAIGWNAYSILYADSVKGRFTISRDNAKNTVYLQMNSLKPEDTAIYYCAARSTSAVGSNQYNYWGQGTQVTVSS

SEQ ID NO: 1514 - protein, 115 aa, synthetic construct
  REGION 1..115: note = Synthetic Construct
AHVQLVESGGGLVQAGGSLRLSCAASGDTFSNYNMAWFRQAPGKERDFVAGISWSGGSTYNTDSVKGRFTMSRDNAKNTVYLQMNSLKPEDTAVYYCRIIGTNYWGQGTQVTVSS

SEQ ID NO: 1515 - protein, 129 aa, synthetic construct
  REGION 1..129: note = Synthetic Construct
ADVQLVESGGGLVQAGGSLRLSCAASGLTFSDYAIGWFRQAPGKERWFVAAIAWTAVMSDYADSVKGRFTISRDNAKNTVYLQMNSLKPEDTAVYYCARGPRFSERGWQPRARSTYDYWGQGTQVTVSS

SEQ ID NO: 1516 - protein, 127 aa, synthetic construct
  REGION 1..127: note = Synthetic Construct
AHVQLVESGGGLVQAGGSLRLSCAASGRTFSAYGMGWFRQAPGKEREFVAGIARSGSEYYGDSVKGRFTISRDNAKNTVYLQMASLKAEDTGVYYCAADPTILYHALSQRTQNYRYWGPGTQVTVSS

SEQ ID NO: 1517 - protein, 126 aa, synthetic construct
  REGION 1..126: note = Synthetic Construct
AQVQLVESGGGLAQSGDSLRLSCAASGRTFDINYMAWFRRAPGKEREFVCTTKWRGEDTYCDGSVQGRFTISRDNVKNTVYLQMNNLKPEDTGTYYCAKVLGRPYGRTWLNDIDVWGKGTQVTVSS

SEQ ID NO: 1518 - protein, 126 aa, synthetic construct
  REGION 1..126: note = Synthetic Construct
ADVQLVESGGGLVQAGGSLRLSCATSGRTFDTYRMSWFRQAPGKDRVFVATIIWSSGSTYYADSVKGRFTISRDNARNMVSLQMNSLKPEDTAVYYCAAQRSDSYSLGYDDDYAYWGQGTQVTVSS

SEQ ID NO: 1519 - protein, 124 aa, synthetic construct
  REGION 1..124: note = Synthetic Construct
AHVQLVESGGGLVQAGGSLRLSCAASGRTFSSYAMGWFRQAPGKEREFVGCITWSDYTLYADSVKGRFTISRDNSKSTVYLQMNSLKPEDTAVYYCAAVPGAAVVTTASLYHAWGQGTQVTVSS

SEQ ID NO: 1520 - protein, 121 aa, synthetic construct
  REGION 1..121: note = Synthetic Construct
AQVQLVESGGGLVQPGGSLRLSCAASGSIHTVNAMGWYRQPPGKQRELVASITDGVSTNYADSVKGRFTISGDDAKNTVYLQMNSLKPEDSAVYYCHVLVTTMALTLTQYWGRGTQVTVSS

SEQ ID NO: 1521 - protein, 123 aa, synthetic construct
  REGION 1..123: note = Synthetic Construct
ADVQLVESGGGLAQAGGSLRLSCAASGSIINFNSMGWYRQAPGKQRELVASITHEGNPNYSDYVKGRFTISQDNGKNTVYLQMNSLGPEDTAVYYCNARLLTPPPILDLKNYWGQGTQVTVSS

SEQ ID NO: 1522 - protein, 122 aa, synthetic construct
  REGION 1..122: note = Synthetic Construct
AHVQLVESGGGLVQAGGSLRLSCAASGRTFTMGWFRQAPGKEQEFVAGISWSGRSTDYADFVKGRATISKDAAKVSLQMNALKLEDTAVYSCAAKKRDWSRDYVTNYDYDYWGRGTQVTVSS

SEQ ID NO: 1523 - protein, 120 aa, synthetic construct
  REGION 1..120: note = Synthetic Construct
AQVQLVESGGGLVQAGGSLRLSCAASGRTFGNYRMAWWRQTPGKERYIVAAITLNAETTYYADSVKGRFTISRDNAKNTVYLEMNSLKPEDTAVYYCAARNPSTAEYDSWGQGTQVTVSS

SEQ ID NO: 1524 - protein, 121 aa, synthetic construct
  REGION 1..121: note = Synthetic Construct
ADVQLVESGGGLVQAGGSLKLSCTASESTFNFNHIDWYRQAPGKQRESVAVITNTDITDYADSVKGRFTISRDNAKNTVYLQMNSLKPEDTAVYLCNAWRFGPPGVKVDYWGQGTQVTVSS

SEQ ID NO: 1525 - protein, 136 aa, synthetic construct
  REGION 1..136: note = Synthetic Construct
AEVQLVESGGGLVQPGGSLRLSCAASQFTEGYYAIGWFRQTPGQEREGVAAISVSDGDPYHRTGDTYYAMSVKGRFTISRDNAKNIVYLHMNRLKPEDTAPYYCGTLTHAAYLTAKSADRMDVSLWGQGTQVTVSS

SEQ ID NO: 1526 - protein, 123 aa, synthetic construct
  REGION 1..123: note = Synthetic Construct
ADVQLVESGGGLVQAGGSLRLSCAASGRDFSTYAMGWFRQAPGKEREFVATITWDGGSTDYKDSVKGRFTFSRDNVKNMVYLQMNSLKPEDTAVYYCAAGYNPTSRSSSYDYWGQGTQVTVSS

SEQ ID NO: 1527 - protein, 127 aa, synthetic construct
  REGION 1..127: note = Synthetic Construct
AEVQLVESGGGLVQAGGSLRLSCAASGRTFSSYTMGWFRQAPGKERDFVAVITPSGIITRYADSVKGRFTISRDNAKNTVYLQMNSLKPEDTAVYYCAATANPYGDTWSVGTQYAYWGQGTQVTVSS

SEQ ID NO: 1528 - protein, 125 aa, synthetic construct
  REGION 1..125: note = Synthetic Construct
AQVQLVESGGGLVQAGGSLRLSCAASGSTFSIDAIGWYRQAPGEQRELVASISGGGTAYYTDSVKGRFTIARTTSTDSPGTTVYLQMNNLKPEDTAVYYCNVHAGNTAYRSGPYWGQGTQVTVSS

SEQ ID NO: 1529 - protein, 126 aa, synthetic construct
  REGION 1..126: note = Synthetic Construct
AQVQLVESGGGLVQAGGSLRLSCAASGLTFSTYAMSWVRQAPGKGREWVAGIQREGTETNYADSVKGRFTISRDNVKKMLYLQMNNLKPEDTALYYCAKVLGRPYGTTWLDDIDVWGKGTQVTVSS

SEQ ID NO: 1530 - protein, 122 aa, synthetic construct
  REGION 1..122: note = Synthetic Construct
ADVQLVESGGGLVQAGGSLRLSCKATGDDFSDWGMAWFRQPPGKEREFVAGITWSGGSTYYADSTKGRFTISRDNAKNTVYLQMNSLKPEDTGVYRCAAGRIVAKNADYDYWGQGTQVTVSS

SEQ ID NO: 1531 - protein, 130 aa, synthetic construct
  REGION 1..130: note = Synthetic Construct
ADVQLVESGGGLVQAGGSLRLTCAASGGTFSTSTMDMGWFRQAPGKEREFVAVDSWNDGRAYYADSVKGRFTMSRDNVQNTVYLEMSSLKPEDTAVYYCAAGSTYYTERLLRTLNDYNYWGQGTQVTVSS

SEQ ID NO: 1532 - protein, 126 aa, synthetic construct
  REGION 1..126: note = Synthetic Construct
AHVQLVESGGGLVQPGGSLRLSCAASGFTFSTYAMSWVRQAPGKGREWVAGIQREGTETSYADAVKGRFTISRDNAKRMVYLQMNNLKPEDTALYYCAKVLGRPYGRTWMDDIDAWGRGTQVTVSS

SEQ ID NO: 1533 - protein, 127 aa, synthetic construct
  REGION 1..127: note = Synthetic Construct
ADVQLVESGGGLVQAGGSLRLSCAASEFSLEYDSIGWFRQAPGKEREGVSCISRRDGSLYYGDSVKGRFTISRDNAKNTVYLQMNNLKPEDTAIYYCATTPHLDGSAYCVSHYFDSWGQGTQVTVSS

SEQ ID NO: 1534 - protein, 127 aa, synthetic construct
  REGION 1..127: note = Synthetic Construct
AHVQLVESGGGLVQVGGSLRLSCAASGTIFRINAMGWYRQAPGKQRELVATIGRRGLTRYADFVKGRFTISRDNDKKTVYLQMNTLKPEDTGVYYCNVITADDPDDHLRNLRTYENWGQGTQVTVSS

SEQ ID NO: 1535 - protein, 126 aa, synthetic construct
  REGION 1..126: note = Synthetic Construct
AEVQLVESGGGLVQAGGSLRLSCAASGRTFSTSIMGWFRQAPGKEREFVTAISRNGVATFYADSVKGRFTISRDNAKNTVYLQMNSLKPEDTGVYYCAAKPRGVGLTDRILDYDYWGQGTQVTVSS

SEQ ID NO: 1536 - protein, 122 aa, synthetic construct
  REGION 1..122: note = Synthetic Construct
AQVQLVESGGGLVQAGGSLRLSCAASGSIFSSKTMAWYRQAPGKQRELVASISSRGTTAYADSVKGRFTISRDNAKNTVDLQMNSLKPEDTAVYYCNTVAPVEGTGRIRAYWGQGTQVTVSS

SEQ ID NO: 1537 - protein, 124 aa, synthetic construct
  REGION 1..124: note = Synthetic Construct
AEVQLVESGGGLVQAGDSLRLSCAVSGRSLSTYDMGWFRQAPGKEREIVASAKWSGDSTYYADSVKGRFSISRDNAKNTVYLQMNSLKPEDTAVYYCAASWDSSGYSLSSYDYWGQGTQVTVSS

SEQ ID NO: 1538 - protein, 125 aa, synthetic construct
  REGION 1..125: note = Synthetic Construct
AHVQLVESGGGFVQPGGSLRLSCTTSGFTLDHYAIGWFRQAPGKEREGVSWIFYSAATTYYADSVKGRFTAARDNAKNTVYLQMDNLKPEDTAVYYCARWRSGATWSREEGYDYWGQGTQVTVSS

SEQ ID NO: 1539 - protein, 126 aa, synthetic construct
  REGION 1..126: note = Synthetic Construct
ADVQLVESGGGLVQAGGSLRLSCAASGGTLRSYNMGWFRQAPAKEREFVAVLSWTGVGTYYADSVKGRFTISRDITKNTLYLQMDSMKSEDTAVYYCAADSTTYRLHSAGSDYHYWGQGTQVTVSS

SEQ ID NO: 1540 - protein, 128 aa, synthetic construct
  REGION 1..128: note = Synthetic Construct
AEVQLVESGGGLVHAGGSLRLSCAASGRTLMNYHMGWLRQAPGKEREFVAAITWNGDTTEYADSVKGRFTISRDNAKNMVSLQMNSLKPEDTGVYYCAASRPSYGSPLQHQPSGYDYWGQGTQVTVSS

SEQ ID NO: 1541 - protein, 124 aa, synthetic construct
  REGION 1..124: note = Synthetic Construct
ADVQLVESGGGLVQAGDSLRLSCAASGRTFGNYVLDWFRQAPGKEREFVASITQTGFGTYYADAVKGRFTISRDNAKNTMYLQMNSLKPEDTAVYYCAADFAPQNGGIRNPTYWGQGTQVTVSS

SEQ ID NO: 1542 - protein, 126 aa, synthetic construct
  REGION 1..126: note = Synthetic Construct
AEVQLVESGGGLVQAGGSLRLSCAASERTVGNNFMGWFRQAPGKDREFVATISWSGDTIYYADSVKGRFTISRDNAKNTVYLQMNSLKPEDTAVYYCVVDSSGTGWDYERRLFDYWGQGTQVTVSS

SEQ ID NO: 1543 - protein, 123 aa, synthetic construct
  REGION 1..123: note = Synthetic Construct
AQVQLVESGGGLLQTGDSLRLSCAASGRTLYTNAMGWFRQAPGKEREFVAAIGWNAYSILYADSVKGRFTISRDNAKNTVYLQMNSLKPEDTAIYYCAARSTSAVGTNQYNYWGQGTQVTVSS

SEQ ID NO: 1544 - protein, 125 aa, synthetic construct
  REGION 1..125: note = Synthetic Construct
AHVQLVESGGGLVQAGGSLRLSCTASGRTFSNSHMGWFRQAPGKEREFVAVISRSGGSTLYADSVKGRFTISRDNAKNTVYLQMNSLKPEDTAVYYCAAARTAGLTSNRSLYDYWGQGTQVTVSS

SEQ ID NO: 1545 - protein, 132 aa, synthetic construct
  REGION 1..132: note = Synthetic Construct
AHVQLVESGGGTVQAGGSLRLSCVVSGRTFDIDAVGWFRQAPGKERSFVAAIRWSDDTTYYSDSVKGRVTISRSNARNTVFLQVNVLQPEDTATYYCAARHSQFAVGGIWYDRKSVSNYDYWGQGTQVTVSS

SEQ ID NO: 1546 - protein, 129 aa, synthetic construct
  REGION 1..129: note = Synthetic Construct
AHVQLVESGGGLVQAGGSLRLTCAASGGTFSTSTMDMGWFRQAPGKEREFVAVDSWNDGRAYYADSVKGRFTISRDNAKNTVYLQMNSLKPEDTAVYYCAADKACYNGHYYRPGDYDYWGPGTQVTVSS

SEQ ID NO: 1547 - protein, 126 aa, synthetic construct
  REGION 1..126: note = Synthetic Construct
ADVQLVESGGGLVQPGGSLRLSCAASGFTFSSSAMSWVRQAPGKGREWVAGIQREGTETKYIDSVKGRFTISRDNAKRTLYLQMNNVKPEDTGLYFCAKVLGRPYGSRWLDDVDAWGKGTQVTVSS

SEQ ID NO: 1548 - protein, 125 aa, synthetic construct
  REGION 1..125: note = Synthetic Construct
AEVQLVESGGGLVQAGGSLRLSCAASGRTFSNSHMGWFRQAPGKEREFVAVISRSGGSTLYADSVKGRFTISRDNAKNTVYLQMNSLKPEDTAVYYCAASRTAGLTSTRSLYDYWGQGTQVTVSS

SEQ ID NO: 1549 - protein, 124 aa, synthetic construct
  REGION 1..124: note = Synthetic Construct
AHVQLVESGGGLVQAGDSLRLSCAASERTFNRKPMGWFRQAPGKEREFVAVISGGGSTWYADSVKGRFTISRDDAKNTVFLQMNSLKPEDTAVYYCVARNGQVFFTNMDAYDYWGQGTQVTVSS

SEQ ID NO: 1550 - protein, 126 aa, synthetic construct
  REGION 1..126: note = Synthetic Construct
AHVQLVESGGGLVQAGGSLRLSCAASGGTFSTSTMDMGWFRQAPGKEREFVAVDSWNDGRAYYADSVKGRFTISRDSAKTTLYLQMNSLKPEDTAVYYCAAETYSNYEKDYSWDYWGQGTQVTVSS

SEQ ID NO: 1551 - protein, 128 aa, synthetic construct
  REGION 1..128: note = Synthetic Construct
AQVQLVESGGGLVHAGGSLRLSCAASGRTLMNYHMGWLRQAPGKEREFVAAITWNGDTTEYADSVKGRFTISRDNAKNMVSLQMNSLKPEDTGVYYCAASRPSYGSPLQRQPAGYDYWGQGTQVTVSS

SEQ ID NO: 1552 - protein, 126 aa, synthetic construct
  REGION 1..126: note = Synthetic Construct
ADVQLVESGGGLVHTGGSLRLSCAASGGTLRSYNMGWFRQAPGKEREFVATISWTGVGTYYADSVKGRFTISRDITKNTLYLQIDSLKPEDTAVYYCAADSTLDRLHSAGSDYRYWGQGTQVTVSS

SEQ ID NO: 1553 - protein, 126 aa, synthetic construct
  REGION 1..126: note = Synthetic Construct
AQVQLVESGGGLVQAGGSLRLSCVASGRTFSTSTMDMGWFRQAPGKEREFVGADAWNDGRTYYADSVKGRFTISRDNAKNTLYLQMNNLKPGDTAVYYCAAETYSLYEKDDSWGYWGQGTQVTVSS

SEQ ID NO: 1554 - protein, 127 aa, synthetic construct
  REGION 1..127: note = Synthetic Construct
AEVQLVESGGGLVQPGGSLRLSCTGSGFTLTWYAISWFRQAPGKEREAVSCITNTGSTGSRTKYAESVKGRFTISRDDAKNTVYLQMNNLKPEDTAVYYCATDRIFDCVLYEKYDYYGEGTQVTVSS

SEQ ID NO: 1555 - protein, 126 aa, synthetic construct
  REGION 1..126: note = Synthetic Construct
ADVQLVESGGGLVQAGGSLRLSCAVSGRTFNSYGMAWFRQAPGKERDFVGTITRDGDTLYTDSVKGRFTISRDNAKNTVYLQMNSLKIEDTALYYCAVRRDSSWGYSRELFEYDYWGQGTQVTVSS

SEQ ID NO: 1556 - protein, 124 aa, synthetic construct
  REGION 1..124: note = Synthetic Construct
AEVQLVESGGGLVQAGGSLRLSCAASGLTYSQYNMGWFRQAPGKEREFVGVTSWSTDTTYYADSVEGRFTISRDNAKNTLYLQMDSLKPEDTAIYYCAAKADYVSSTPGVYDYWGQGTQVTVSS

SEQ ID NO: 1557 - protein, 124 aa, synthetic construct
  REGION 1..124: note = Synthetic Construct
AHVQLVESGGGLVQSGGSLRLSCAVSGRSLSTYDMGWFRQAPGKEREIVASAKWSGDSTYYADSVKGRFSISRDNAKNMVYLQMNSLKPEDTAVYYCAASWDSSGYSLSSFDYWGQGTQVTVSS

SEQ ID NO: 1558 - protein, 115 aa, synthetic construct
  REGION 1..115: note = Synthetic Construct
AHVQLVESGGGLVQAGGSLRLSCSASGFDFSHNTWAWYRQAPGKQRELVATISNSGSTNYADSVKGRFTIARDNAKNTVSLQMNTLKPEDTAVYFCKKESGVNYWGQGTQVTVSS

SEQ ID NO: 1559 - protein, 126 aa, synthetic construct
  REGION 1..126: note = Synthetic Construct
AQVQLVESGGGLVQAGGSLRLTCAASGGTFSTSTMDMGWFRQAPGKEREFVAVDSWNDGRAYYADSVKGRFTISRDSAKTTLYLQMNSLKPEDTAVYYCAAKTYSNYEKDYSWGYWGQGTQVTVSS

SEQ ID NO: 1560 - protein, 124 aa, synthetic construct
  REGION 1..124: note = Synthetic Construct
AQVQLVESGGGLVQAGGSLRLSCAASGRTFSSNSMAWFRQAPGKEREFVATINWSGGDIYYADSVKGRFTISADNGKNTVYLQMNSLKPEDTAVYYCAAARFYGRSMAGDYDSWGQGTQVTVSS

SEQ ID NO: 1561 - protein, 122 aa, synthetic construct
  REGION 1..122: note = Synthetic Construct
AQVQLVESGGGLVQAGGSLRLSCAVSGRTFSISTMGWFRQAPGKERLFVAGITWHDGSTNYADSVKGRFTISRDNAKNTVYLQMNSLKPEDTALYYCAARKSINYVQEYDYWGRGTQVTVSS

SEQ ID NO: 1562 - protein, 125 aa, synthetic construct
  REGION 1..125: note = Synthetic Construct
AEVQLVESGGGVVQVGGSLRLSCVASGRDFSGYTMGWFRQAPGKEREFVAAISGSSSSIVYQDSVKGRFTISRDNARNTMYLHMNTLNPDDTAVYICASPYTTAWPTKLGDYDYWGQGTQVTVSS

SEQ ID NO: 1563 - protein, 117 aa, synthetic construct
  REGION 1..117: note = Synthetic Construct
AHVQLVESGGGLVQAGGSLRLSCAVSGSTLGINAIGWYRQPPGKQRELVASISSLGTTLYAESVKGRFAISRDNAKNTGYLQMNSLKPDDTAVYYCNMRTPYMRDHWGQGTQVTVSS

SEQ ID NO: 1564 - protein, 126 aa, synthetic construct
  REGION 1..126: note = Synthetic Construct
AHVQLVESGGGLVQTGGSLRLSCAASGRAFSNYAMGWFRQGPGKEREFVAAISGNGDVTNYLASLKGRFAISKDDAKNTGYLQMNSLKPEDTAVYYCAADPGTSLYMDRESEYNYWGQGTQVTVSS

SEQ ID NO: 1565 - protein, 124 aa, synthetic construct
  REGION 1..124: note = Synthetic Construct
AQVQLVESGGGLVQAGGSLRLSCAVSGSTLGINAIGWYRQPPGKQRELVASISSLGTTLYAESVKGRFAISRDNAKNTGYLQMNSLKPEDTAVYYCAARMPQMIITTPRAYDYWGQGTQVTVSS

SEQ ID NO: 1566 - protein, 122 aa, synthetic construct
  REGION 1..122: note = Synthetic Construct
AQVQLVESGGGLVQAGGSLRLSCAASGRILNFNTMGWYRQAPGKERELVAKLTGGNMPEYADFVKGRFTISRPNGNSVYLQMNSLTPEDTAVYYCNARLLTPPPILDLKDWWGQGTQVTVSS

SEQ ID NO: 1567 - protein, 123 aa, synthetic construct
  REGION 1..123: note = Synthetic Construct
AQVQLVESGGGLVQAGGSLRLSCVASGRTFSRYAMGWFRQAPGKEREFVAGISWSGGRTDYADSVKGRFTISRDNAKNTVYLRMNTMKPEDTAIYYCAAGRILSDSASDYTYWGQGTQVTVSS

SEQ ID NO: 1568 - protein, 129 aa, synthetic construct
  REGION 1..129: note = Synthetic Construct
ADVQLVESGGGLVQAGGSLRLSCTVSGRTFSSLAMGWFRQAPGKEREFVAGISWGSHDTAYADSVKGRFTVSRDNAKATVYLQMNRLKPEDTAVYYCAADDGGGSYYDPSTREHYYDYWGQGTQVTVSS

SEQ ID NO: 1569 - protein, 125 aa, synthetic construct
  REGION 1..125: note = Synthetic Construct
AHVQLVESGGGLVQAGDSLRLSCTASGRTLRSYNMGWFRQAPGKEREFVAAISWTGIGTYYADSVKGRFTISRDDAKNTVYLQMNSLMPEDTAVYYCKMNIGDYRRDPYTGYDTWGQGTQVTVSS

SEQ ID NO: 1570 - protein, 123 aa, synthetic construct
  REGION 1..123: note = Synthetic Construct
AHVQLVESGGGLVQAGGSLRLSCAASGSIFSILNMGWYRQAPGKQRDLVARITPGGSTDYADSVKGRFTISRDNAKNTLYLQMNSLKPEDTAVYYCNARLLTPPPILDLKDYWGQGTQVTVSS

SEQ ID NO: 1571 - protein, 125 aa, synthetic construct
  REGION 1..125: note = Synthetic Construct
AQVQLVESGGGLVQTGDSLRLSCAASGRTFDISYMGWFRRAPGKEREFVCTIKWTGDDAYCSGSVGGRFTISRDNTKNAVYLQMNSLNPEDTAVYYCAGRLFPGIATSSLDYGSWGQGTQVTVSS

SEQ ID NO: 1572 - protein, 125 aa, synthetic construct
  REGION 1..125: note = Synthetic Construct
AHVQLVESGGGLVQAGGSLRLSCAASGRTFSNSHMGWFRQAPGKEREFVAVISRSGGSTLYADSVKGRFTISRDNAKNTVYLQMNSLKPEDTAVYYCAGSRTAGLTSNPFLYDSWGQGTQVTVSS

SEQ ID NO: 1573 - protein, 120 aa, synthetic construct
  REGION 1..120: note = Synthetic Construct
AQVQLVESGGGLVQAGGSLRLSCAASGRAIGIHRMAWFRQAPGKERAFVAAIQWTGDMPTYADSLKGRFTISADNAKNTVSLQMTSLKPDDTAVYYCAARSATTALYDDWGQGTQVTVSS

SEQ ID NO: 1574 - protein, 128 aa, synthetic construct
  REGION 1..128: note = Synthetic Construct
AHVQLVESGGGLVQAGGSLRLSCAASGSIFRHYNMGWFRQAPGKEREFVSAISWTNIGTYYADSVKGRFSISRDNNRNTAYLEMNSLKPEDTAVYYCAADRSEFGSRLYSDENEYDYWGQGTQVTVSS

SEQ ID NO: 1575 - protein, 125 aa, synthetic construct
  REGION 1..125: note = Synthetic Construct
AEVQLVESGGGLVQAGGSLRLSCAASGFTFSNYAMAWFRQAPGKEREFVAEISRPGGMSDYADSVKGRFTISRDNTKNALYLQMNNLKPEDTAVYYCAADKWAVAHSDWVRYDYWGQGTQVTVSS

SEQ ID NO: 1576 - protein, 128 aa, synthetic construct
  REGION 1..128: note = Synthetic Construct
ADVQLVESGGGLVQAGDSLRLSCAASEPTINSYVMGWFRQPPGKDRELVAGMTYSGSSTYYVDSVKGRFTISRDNAKNTVYLQMNSLKPEDTAVYYCAARSTGSFYYIGKRSNEYDYWGQGTQVTVSS

SEQ ID NO: 1577 - protein, 128 aa, synthetic construct
  REGION 1..128: note = Synthetic Construct
AQVQLVESGGGLVQAGGSLRLSCAASGGTFSSYAMGWFRQAPGKEREFVGAISRSGGGTSYLDSVKGRFTISRDNAKNTVYLQMNSLKPEDTAVYYCAADLSALWHGIPTTARQFDSWGQGTQVTVSS

SEQ ID NO: 1578 - protein, 117 aa, synthetic construct
  REGION 1..117: note = Synthetic Construct
AQVQLVESGGGLVQAGGSLRLSCAVSGSTLGINAIGWYRQPPGKQRELVASISSLGTTLYAESVKGRFAISRDNAKNTAYLQMNSLKPEDTAVYYCNMRTPYMREYEGQGTQVTVSS

SEQ ID NO: 1579 - protein, 126 aa, synthetic construct
  REGION 1..126: note = Synthetic Construct
ADVQLVESGGGLVQAGGSLRLSCAASGRTVSSSTMDMGWFRQAPGKEREFVAVHSWNDGRTYYADSVKGRFTISRDNAKNTLYLQMNSLKPEDTAVYYCAAETYSLYEKEDSWGYWGQGTQVTVSS

SEQ ID NO: 1580 - protein, 126 aa, synthetic construct
  REGION 1..126: note = Synthetic Construct
ADVQLVESGGGLVQPGGSLRLSCAASGNTFSPNTMGWFRQAPGKEREFVAAISASGGSTNYIDSVKGRFTISRDNAENTVYLQMNNLAADDTAVYYCARWAQPHTVRVAITTPNYWGKGTQVTVSS

SEQ ID NO: 1581 - protein, 126 aa, synthetic construct
  REGION 1..126: note = Synthetic Construct
AHVQLVESGGGLVQAGGSLRLSCAAEGVTFRSYVMGWFRQAPGKEREFVVAIRRSGVTTAYADFVKGRFGISRDNAKNMVYLQMNSLKPDDTAVYYCAAVFESSSNYYDKTSYEYWGQGTQVTVSS

SEQ ID NO: 1582 - protein, 124 aa, synthetic construct
  REGION 1..124: note = Synthetic Construct
AQVQLVESGGGLVQPGGSLRLSCAASGFTFSRTNMMWVRQAPGKGPEWVSTIDDKGTNPTYADSVKGRFTTSRDNAKNTVHLQMNNLKPDDTAIYYCAQCKNYYICDPSARDWWGIGTQVTVSS

SEQ ID NO: 1583 - protein, 126 aa, synthetic construct
  REGION 1..126: note = Synthetic Construct
ADVQLVESGGRLVHAGDSLRLSCTVSGTTLTDYAMGWFRRFPGKEREFLATLDWESDRTYYADSAEGRFTMSKGSAANTVFLQMNSLKPEDTAVYFCAAKSDAHYTPIHDYEYDYLGQGTQVTVSS

SEQ ID NO: 1584 - protein, 129 aa, synthetic construct
  REGION 1..129: note = Synthetic Construct
ADVQLVESGGGLVQPGGSLRLSCAASTITLDDYGIGWFRQGPGKERERVACWSRYDGRTYYADSVKGRFTISRDNAKNTVYLQMNNLKEEDTAVYYCAAPLKIDYAIGRCLATMTGTTWGQGTQVTVSS

SEQ ID NO: 1585 - protein, 135 aa, synthetic construct
  REGION 1..135: note = Synthetic Construct
ADVQLVESGGGLVQAGGSLRLSCAASGFTLDHYAIGWFRQAPGKEREGVSCISASDGRTYYGSTYYADSVKGRFTISRDNAKNMVFLQMNNLQPEDTATYYCSTYSGRSQYYCSGEESLRDYDYWGQGTQVTVSS

SEQ ID NO: 1586 - protein, 123 aa, synthetic construct
  REGION 1..123: note = Synthetic Construct
AHVQLVESGGGLVQAGGSLRLSCAASGSIINFNSMGWYRQAPGQQRELVASITHEGNPNYSDYVKGRFTISQEKGKRTVHLQMNNLGPEDTAVYYCNARLLTPPPILDLKNFWGQGTQVTVSS

SEQ ID NO: 1587 - protein, 123 aa, synthetic construct
  REGION 1..123: note = Synthetic Construct
AEVQLVESGGGLVQAGGSLRLSCAASGRTFSGLTMGWFRQAPGKEREFVATISWRGDTYYADSVKGRFTTSRDNAKNMVYLQMNSLKPEDTAIYYCAATLTDYETDRRGYGDWGQGTQVTVSS

SEQ ID NO: 1588 - protein, 124 aa, synthetic construct
  REGION 1..124: note = Synthetic Construct
AQVQLVESGGGLVQAGGSLRLSCAASGRTFSSNSMAWFRQAPGKEREFVATINWSGGDIYYADSVKGRFTISRDNGKNTVYLQMNSLKPEDTAVYYCAAARFYGRSTARDYDSWGQGTQVTVSS

SEQ ID NO: 1589 - protein, 123 aa, synthetic construct
  REGION 1..123: note = Synthetic Construct
AQVQLVESGGGLVQAGGSLRLSCVASGSGFEPNAMGWYRQAPGKQRELVAGITSGGNTNYADSVKGRFTISRDNVKNTVYLQMNSLKPEDTAVYYCNAVAPRINPRGSPTNYWGQGTQVTVSS

SEQ ID NO: 1590 - protein, 128 aa, synthetic construct
  REGION 1..128: note = Synthetic Construct
AHVQLVESGGGLVQAGGSLRLSCAASGRTFSSYAMGWFRQAPGKEREFVAAITWNADSTYYSDSKKGRFTISRDNAKNMVSLQMNSLKPEDTGVYYCAASRPSYGLPLQRQPSLYDYWGQGTQVTVSS

SEQ ID NO: 1591 - protein, 126 aa, synthetic construct
  REGION 1..126: note = Synthetic Construct
AQVQLVESGGGLVQAGGSLRLTCAASGRTFSSSTMDMGWFRQAPGKEREFVALDSWNGGRTYYADSVKGRFTISRDNAKNTLYLQLNSLKPEDTAVYYCAADSYSIYERADSWGYWGQGTQVTVSS

SEQ ID NO: 1592 - protein, 131 aa, synthetic construct
  REGION 1..131: note = Synthetic Construct
ADVQLVESGGGLVQAGGSLRLSCAASGFTLDYYTIGWFRQAPGKEREGISCISSSDGFTYYADSVKGRFSISRDKNTVYLQLNNLRPDDTAVYTCATEEYSADGPYKRRGCMTASIWYKYWGQGTQVTVSS

SEQ ID NO: 1593 - protein, 116 aa, synthetic construct
  REGION 1..116: note = Synthetic Construct
AQVQLVESGGGLVQAGGSLRLSCAASGSIFSANVMGWYRQTPGKQRELVASITNTGTAYYTDSVKGRFAISRDNGKNTVYLQMNSLKPDDTAVYYCNTWPTARASWGQGTQVTVSS

SEQ ID NO: 1594 - protein, 119 aa, synthetic construct
  REGION 1..119: note = Synthetic Construct
AQVQLVESGGGLVQAGGSLRLSCAASGRTLDSMAWFRQAPGKEREFVAKCWSDGTTAYADSVKGRFTISRDNAKNTVHLQMNTLKPEDTAVYYCAADTAFHVRGSWPYWGQGTQVTVSS

SEQ ID NO: 1595 - protein, 125 aa, synthetic construct
  REGION 1..125: note = Synthetic Construct
AQVQLVESGGGLVQSGGSLRLSCAASEQITSNYVMAWFRQAPGKEREFVAALIWDDGGTNYGNSVKGRFTISRDNAKNTMYLQMDSLRSEDTAVYYCAARLRPIFGWGTRNFDSWGQGTQVTVSS

SEQ ID NO: 1596 - protein, 123 aa, synthetic construct
  REGION 1..123: note = Synthetic Construct
AQVQLVESGGGLVQAGGSLTLSCAASGRTFSSHAMAWFRQAPGKEREFVAGISWSGPYYVDSVKGRFTISTDNAKNTVYLQMNSLTPEDTAVYYCASSRGPNLYPHIGDIEYWGQGTQVTVSS

SEQ ID NO: 1597 - protein, 123 aa, synthetic construct
  REGION 1..123: note = Synthetic Construct
AHVQLVESGGGLVQAGGSLRLSCAASGRNFSMYTMGWFRQAPGKEREFVATLTWNGGRFYYADPVKGRFTISRDNAKNTVYLQMNILKPEDTARYYCAADLNNFGRGWVAEYWGQGTQVTVSS

SEQ ID NO: 1598 - protein, 124 aa, synthetic construct
  REGION 1..124: note = Synthetic Construct
ADVQLVESGGGLVQAGGSLRLSCAVSGAGAHRVGWFRRAPGKERDFVAAITEHGTTVYADSVKGRFTISRDNKKNTVNLQMNSLKSEDTAVYYCAAHWDNTQWYAYEVGGYEFWGQGTQVTVSS

SEQ ID NO: 1599 - protein, 127 aa, synthetic construct
  REGION 1..127: note = Synthetic Construct
AQVQLVESGGGLVQAGGSLRLSCAASGRTFSNYAMGWFRQSPGKEREFVAVISIGRSTDYSDSVKGRFTISRDNAKNTVYLQMNSLKPEDTAVYYCAADQAPLRFSYSLTRDEYDYWGQGTQVTVSS

SEQ ID NO: 1600 - protein, 124 aa, synthetic construct
  REGION 1..124: note = Synthetic Construct
AQVQLVESGGGLVQAGGSLRLSCIPSGSFNSVNTMGWYRQASGKQRELVADITRVGGTRYADSVKGRFTISRDNDKNLVYLQMNRLSPEDTAVYYCNAAIRPSSSSSGYYESFWGRGTQVTVSS

SEQ ID NO: 1601 - protein, 126 aa, synthetic construct
  REGION 1..126: note = Synthetic Construct
AEVQLVESGGGLVQAGGSLRLSCTTSGRTFGTYRMSWFRQAPGKDRIFVATIIWSSGSTYYADSVKGRFTISRDNAKNMVSLQMNSLKAEDTAVYYCAAQRSDSYSLGYEDDYAYWGQGTQVTVSS

SEQ ID NO: 1602 - protein, 124 aa, synthetic construct
  REGION 1..124: note = Synthetic Construct
ADVQLVESGGGLVQAGGSLRLSCAASGRTFSRNTVGWFRQAPGKEREFVGCITWSDYTLYADSVKGRFTISRDNSKSTVYLQMNSLKPEDTAVYYCAAVPGAAVVTTASIYHAWGQGTQVTVSS

SEQ ID NO: 1603 - protein, 121 aa, synthetic construct
  REGION 1..121: note = Synthetic Construct
AHVQLVESGGDLVQPGGSLRLSCAASGFTFGNYAMSWVRQAPGKGPEWVSSIAPRTGGTYYANSVKGRFTISRDNANNMLYLQMNNLKSEDTAVYYCSKGNEFTSTDRANWGQGTQVTVSS

SEQ ID NO: 1604 - protein, 128 aa, synthetic construct
  REGION 1..128: note = Synthetic Construct
AQVQLVESGGGLVQAGGSLRLTCAASGGTFSTSTMDMGWFRQAPGKEREFVAVDSWNDGRAYYADSVKGRFTISRDNIKNTLYLQMDSLKPEDTAIYYCAADSTTDRLHSAGSDYPYWGQGTQVTVSS

SEQ ID NO: 1605 - protein, 128 aa, synthetic construct
  REGION 1..128: note = Synthetic Construct
AHVQLVESGGGLVQAGGSLRLSCAASGGTFSSYAMGWFRQTPGKEREFVGAISRSGGGTSYLDSVKGRFTISRDNAKNTMYLQMNSLKPEDTAVYYCAADLSALWHGVPTTARQYDYWGQGTQVTVSS

SEQ ID NO: 1606 - protein, 126 aa, synthetic construct
  REGION 1..126: note = Synthetic Construct
AEVQLVESGGGLVQAGGSLRLTCAASGRTFSSSTMDMGWFRQAPGKEREFVALDSWNDGRTYYADSVKGRFTISRDNAKNTLYLQLNSLKPEDTAVYYCAADSYSIYEKADSWGYWGQGTQVTVSS

SEQ ID NO: 1607 - protein, 117 aa, synthetic construct
  REGION 1..117: note = Synthetic Construct
AQVQLVESGGGLVQAGGSLRLSCAASGSTFSINAIGWYRQAPGKQRERVAVISHVGQTNYADSVKGRFTISRDNAKNTVYLQMNSLKPEDTAVYVCNASPIIGSTYWGQGTQVTVSS

SEQ ID NO: 1608 - protein, 128 aa, synthetic construct
  REGION 1..128: note = Synthetic Construct
AEVQLVESGGGLVQAGGSLRLSCAASGRTFSSSVMGWFRQAPGKERELVAFIRRIGSSTYYADSVKGRFTVSRDNAKNTVYLQMNSLKPEDTAGYYCAASTRTYYSGRLYSAGEFEYWGQGTQVTVSS

SEQ ID NO: 1609 - protein, 127 aa, synthetic construct
  REGION 1..127: note = Synthetic Construct
AHVQLVESGGGLVQAGGSLRLSCAASGRTFSNWDMAWFRQAPGKEREFVAATAWSGGPTYYTHSVKGRFTISRDSAKNTVYLQMNSLQPEDTAVYHCAADLDPDWYLQDHPDTYLYWGQGTQVTVSS

SEQ ID NO: 1610 - protein, 129 aa, synthetic construct
  REGION 1..129: note = Synthetic Construct
AHVQLVESGGGLVQAGDSLRLSCEVSGGTFSRLAMAWVRQAPGKEREFVAGISWGSHDTAYADSVKGRFIVSRDNAKSTAYLQMNRLKPEDTAVYYCAADDGGGSYYDPSTRLHFYDYWGQGTQVTVSS

SEQ ID NO: 1611 - protein, 123 aa, synthetic construct
  REGION 1..123: note = Synthetic Construct
AHVQLVESGGGLVQTGGSLRLSCAASGRTFDISYMGWFRRAPGKEREFVATITWDGDSTDYEHSVKGRFTMYRDNVKNMAYLQMNSLKPEDTAVYYCAAGYNPTSRSAAYDYWGQGTQVTVSS

SEQ ID NO: 1612 - protein, 127 aa, synthetic construct
  REGION 1..127: note = Synthetic Construct
AHVQLVESGGGLVQAGGSLRLSCVASGGTFSSYAMGWFRQAPGKEREFVAAISRGGSTDYADSVKGRFTISRDNAKNTVYLQMNSLKPEDTAVYYCAADQSPLVFGVPRSQGQYDYWGQGTQVTVSS

SEQ ID NO: 1613 - protein, 126 aa, synthetic construct
  REGION 1..126: note = Synthetic Construct
AEVQLVESGGGLVQPGGSLRLSCAASGFTFSSSAMTWFRQAPGKGREWVAGIQREGTETKYADSVKGRFTISRDNAKKTLYLQMNNLKPEDTAQYYCAKVLGRPYGSHWMDDMDYWGRGTQVTVSS

SEQ ID NO: 1614 - protein, 128 aa, synthetic construct
  REGION 1..128: note = Synthetic Construct
AEVQLVESGGGLVQAGGSLRLSCAASGGTFSSYNMGWFRQAPGKEREFVAFIRWSGTSTYYADSVKGRFTISRDNAKNTVYLQMNSLKPEDTAVYYCAATSRTMIHTSQSLPINWDYWGQGTQVTVSS

SEQ ID NO: 1615 - protein, 117 aa, synthetic construct
  REGION 1..117: note = Synthetic Construct
AHVQLVESGGGLVQAGGSLRLSCAVSGSTLGINAIGWYRQPPGKQRELVASISSLGTTLYAESVKGRFAISRDNAKNTGYLQMNSLKPEDTAVYYCNMRTPYIRDYWGQGTQVTVSS

SEQ ID NO: 1616 - protein, 127 aa, synthetic construct
  REGION 1..127: note = Synthetic Construct
AQVQLVESGGGLVQAGDSLRLSCTASGRTFSAYGMGWFRQAPGKEREFVAGIARSGSAYYGDSVKGRFTISRDNAKNTVYLQMASLKAEDTGVYYCAADPTILYHAISQRTQTYRYWGPGTQVTVSS

SEQ ID NO: 1617 - protein, 117 aa, synthetic construct
  REGION 1..117: note = Synthetic Construct
AQVQLVESGGGLVQAGGSLRLSCAVSGSTLGINAIGWYRQPPGKQRELVASISSLGTTLYAESVKGRFAISRDNAKNTGYLQMNSLKPDDTAVYYCNMRTPYRRDYWGQGTQVTVSS

SEQ ID NO: 1618 - protein, 117 aa, synthetic construct
  REGION 1..117: note = Synthetic Construct
AHVQLVESGGGLVQAGGSLRLSCAVSGSTLGINAIGWYRQPPGKQRELVASISSLGTTLYAESVKGRFAISRDNAKNTAYLQMNSLKPDDTAVYYCNMRTPYVRDYWGQGTQVTVSS

SEQ ID NO: 1619 - protein, 122 aa, synthetic construct
  REGION 1..122: note = Synthetic Construct
AHVQLVESGGGLVQAGGSLRLSCAASGSDFSILAIAWYRQAPGKQRELVAAISRVGGTNYADSVKGRFTITRDNTKNTVYLQMNSLKPEDTAVYYCNAGIPMTTVLLGQGFWGQGTQVTVSS

SEQ ID NO: 1620 - protein, 124 aa, synthetic construct
  REGION 1..124: note = Synthetic Construct
AQVQLVESGGGLVQAGGSLRLSCAASGRTFGSTMAWFRQAPGKERDFVAAITWSADRISYADSVKGRFTISRDNDKNIVHLQMNSLKPEDTAVYVCAARASSNTYDDPRSFAFWGQGTQVTVSS

SEQ ID NO: 1621 - protein, 130 aa, synthetic construct
  REGION 1..130: note = Synthetic Construct
ADVQLVESGGGSVQAGGSLRLSCTASGPTVSFFSYSMAWFRQAPGKEREFVAGVTRTGGRRNYADSVQGRFTISKDNAKNTVSLQMNSLKSDDTAIYYCAADATRAYSSLSQRTDDYDYWGQGTQVTVSS

SEQ ID NO: 1622 - protein, 128 aa, synthetic construct
  REGION 1..128: note = Synthetic Construct
AHVQLVESGGGLVQPGASLRLTCGPSGRSVGLYTMGWFRQAPGKEREFVGGVTYLGDTTSYSDAVKGRFTISRENNKNTVYLQMNSLKPEDTAVYYCTATATGWGSPVPRVPDRWDYWGQGTQVTVSS

SEQ ID NO: 1623 - protein, 130 aa, synthetic construct
  REGION 1..130: note = Synthetic Construct
ADVQLVESGGGLVQAGGSLRLSCAASGSIFSILNMGWYRQAPGKQRDLVARITPGGSTDYADSVKGRFTISRDNAKNTLYLQMNNLKPDDTASYRCTKEHARGFGGWSNPNPSDLVYSAWGQGTQVTVSS

SEQ ID NO: 1624 - protein, 125 aa, synthetic construct
  REGION 1..125: note = Synthetic Construct
AQVQLVESGGGLVQAGGSLRLSCAASGRSFSNAFMGWFRQTPGKERAFVAAIRLSDGMTYYTNSVRGRFAGSRDNAQNTVSLQMNSLKPEDSAVYYCAARRSGGELTNRDFWDYWGQGTQVTVSS

SEQ ID NO: 1625 - protein, 126 aa, synthetic construct
  REGION 1..126: note = Synthetic Construct
AHVQLVESGGGLVQAGGSLRLTCAASGGTFSTSTMDMGWFRQAPGKEREFVAADNWNGGRTYYADSVKGRFTISRDNAKNTLYLQLNSLKPEDTAVYYCVADSYSIYEKDYSWGYWGQGTQVTVSS

SEQ ID NO: 1626 - protein, 126 aa, synthetic construct
  REGION 1..126: note = Synthetic Construct
AQVQLVESGGGLVQAGGSLRLSCAASGSIFSILNMGWYRQAPGKQRDLVARITPGGSTDYADSVKGRFTISRDNAKNTLYLQMNSLKPEDTAVYYCAAQSGRWYGIDCDSYDYDYWGQGTQVTVSS

SEQ ID NO: 1627 - protein, 123 aa, synthetic construct
  REGION 1..123: note = Synthetic Construct
AHVQLVESGGGLVQTGGSLRLSCAASGRTFDINYMGWFRRAPGKEREFVCTIKWSGEERYCADSGRFTISRDNAKNTVYLQMNSLTPEDTAVYYCAARVFPGIATSSIDYASWGQGTQVTVSS

SEQ ID NO: 1628 - protein, 127 aa, synthetic construct
  REGION 1..127: note = Synthetic Construct
AQVQLVESGGGLVQAGDSLRLSCTASGRTFSAYGMGWFRQVPGKEREFVAGIARSGSEYYGDSVKGRFTISRDNVKNTVYLQMNNLKAEDTGVYYCAADRTILYHGLSQRTQNYQFWGPGTQVTVSS

SEQ ID NO: 1629 - protein, 125 aa, synthetic construct
  REGION 1..125: note = Synthetic Construct
AEVQLVESGGGLAQSGDSLRLSCAASGRTFDINYMAWFRRAPGKEREFVCTTKWSGEDTYCDGSVQGRFTISRDNAKNSVYLQMDSLQPEDSAVYYCAARLFPGIATSSLDYSPWGQGTQVTVSS

SEQ ID NO: 1630 - protein, 126 aa, synthetic construct
  REGION 1..126: note = Synthetic Construct
AHVQLVESGGGLVQAGGSLRLTCAASGGTFSTSTMDMGWFRQAPGKEREFVAVDSWNDGRAYYADSVKGRFTISRDSAKTTLYLQMNSLKPEDTAVYYCAAETYSNYEKDHSWGYWGQGTQVTVSS

SEQ ID NO: 1631 - protein, 128 aa, synthetic construct
  REGION 1..128: note = Synthetic Construct
AHVQLVESGGGLVQAGGSLRLTCAASGGTFSTSTMDMGWFRQAPGKEREFVAVDSWNDGRAYYADSVKGRFTISRDSAKTTLYLQMNSLKPEDTAVYYCALAVITFRDGRGDQDYSYWGRGTQVTVSS

SEQ ID NO: 1632 - protein, 128 aa, synthetic construct
  REGION 1..128: note = Synthetic Construct
ADVQLVESGGGLVQAGGSLRLSCAASGRTFSRFAAGWFRQAPGKEREFVAVIDWNGGSAYYADSVKGRFTISRDNAKNTVYLQMNRLKPGDTAVYICAIGGNHYDPSRYYIADEYDYWGQGTQVTVSS

SEQ ID NO: 1633 - protein, 126 aa, synthetic construct
  REGION 1..126: note = Synthetic Construct
AHVQLVESGGGLVQAGGSLRLSCATSGRTFGTYRMSWFRQAPGKERVFVATIIWSSGSTYYADSVKGRFTISRDNAKNMVSLQMNSLKPEDTAVYYCAAQRSDSYSRGYEDDYDYWGQGTQVTVSS

SEQ ID NO: 1634 - protein, 131 aa, synthetic construct
  REGION 1..131: note = Synthetic Construct
AEVQLVESGGGLVQPGGSLRLSCAASGFTWGDYAIGWFRQAPGKEREGVSCLSSSDGRTYYPDSVKDRFTISTDNAKNTVYLQMTNLKPDDTAIYYCAAREGPGASWYCSVNGYLTQPDSWGQGTQVTVSS

SEQ ID NO: 1635 - protein, 125 aa, synthetic construct
  REGION 1..125: note = Synthetic Construct
ADVQLVESGGGLAQSGDSLRLSCAASGRTFDINYMAWFRRAPGKEREFVCTTKWSGEDTYCDGSVQGRFTISRDNAKNTVYLQMNSLTPEDTAIYFCAARVFPGIATSSLDYSSWGQGTQVTVSS

SEQ ID NO: 1636 - protein, 128 aa, synthetic construct
  REGION 1..128: note = Synthetic Construct
ADVQLVESGGGLVQVGASLRLTCGPSGRSVGLYTMGWFRQAPGKEREFVAGITYLGDATTYNDAVKGRFTISKENNKNTVYLQMNSLKPEDTGVYFCTATATGWGSPIPSVPDRWDYWGQGTQVTVSS

SEQ ID NO: 1637 - protein, 126 aa, synthetic construct
  REGION 1..126: note = Synthetic Construct
AQVQLVESGGGLVQAGGSLRLTCRASGRTFSSSTMDMGWFRQAPGKERVFVAVDAWNDGRTYYADSVKGRFTISRDNAKNTLYLQMNSLKPEDTAVYYCAAETYSNYEKAYSWGYWGQGTQVTVSS

SEQ ID NO: 1638 - protein, 117 aa, synthetic construct
  REGION 1..117: note = Synthetic Construct
ADVQLVESGGGLVQAGGSLRLSCAASGRTFSIYNMGWFRQAPGKEREFVSHMNWSNGNTATAASVKDRFTISRDNAKNTVYLQMSSLKPEDTAVYYCHATTDDYDYWGQGTQVTVSS

SEQ ID NO: 1639 - protein, 126 aa, synthetic construct
  REGION 1..126: note = Synthetic Construct
AQVQLVESGGGLVQAGGSLRLSCAASGRTFSTSTMDMGWFRQAPGKEREFVGLDSWNDGRTYYADSVKGRFTISRDNAKNTLYLQMNNLKPEDTAVYYCAAETYSLYEKADSWGYWGQGTQVTVSS

SEQ ID NO: 1640 - protein, 128 aa, synthetic construct
  REGION 1..128: note = Synthetic Construct
AQVQLVESGGGLVPAGGSLRLSCAASGRAFITFSINTIAWFRQAPGKEREFVAVLEWESGSTYHADSVKGRFAISKDNAKNTVDLQMSSLKPEDTAVYYCAAANWFGRSDDAGQYNYWGQGTQVTVSS

SEQ ID NO: 1641 - protein, 127 aa, synthetic construct
  REGION 1..127: note = Synthetic Construct
AQVQLVESGGGLVQAGDSLRLSCTASGRTFSAYGMGWFRQAPGKEREFVAGIARSGSEYYGDSVKGRFTISRDNAKNTVYLQMASLKAEDTGVYYCAADPTILYHAISQRTQNYRAWGPGTQVTVSS

SEQ ID NO: 1642 - protein, 124 aa, synthetic construct
  REGION 1..124: note = Synthetic Construct
AHVQLVESGGGLVQAGGSLRLSCTASGSISRIYEVTWYRQPPGKQRDMVATISEDSKTNYADSVRHRFTISRDNEKNTVYLQMNSLMPEDTAVYYCKMNVGDLWRNPYTGYDFWGQGTQVTVSS

SEQ ID NO: 1643 - protein, 127 aa, synthetic construct
  REGION 1..127: note = Synthetic Construct
AHVQLVESGGGLVQAGDSLRLSCTASGRTFSAYGMGWFRQAPGKEREFVAGIARSGSEYYGDSVKGRFTISRDNAKNTVYLQMASLKAEDTGVYYCAADPTIPYHAISQRTQNYRYWGPGTQVTVSS

SEQ ID NO: 1644 - protein, 127 aa, synthetic construct
  REGION 1..127: note = Synthetic Construct
ADVQLVESGGGLVQAGGSLRLTCAASGGTFSTSTMDMGWFRQAPGKEREFVAVDSWNDGRAYYADSVKGRFTISRDSAKTTLYLQMNSLKPEDTAVYYCKMGIGDYMRDPYTPYDTWGQGTQVTVSS

SEQ ID NO: 1645 - protein, 126 aa, synthetic construct
  REGION 1..126: note = Synthetic Construct
AHVQLVESGGGLVQAGGSLRLSCAASGRTFSTSIMGWFRQAPGKEREFVTAISRNGVATFDADSVKGRFTISRDNAKNTVYLQMNSLKPEDTGVYYCAAKPRGVGLTDRIADYDYWGQGTQVTVSS

SEQ ID NO: 1646 - protein, 125 aa, synthetic construct
  REGION 1..125: note = Synthetic Construct
AQVQLVESGGGLVQAGGSLRLSCAASGLTFSSYTMGWFRQAPGKERDFVALIRWPFGHTSYADLLKGRFIISKDNAKNTVYLQMNSLKPEDTAVYYCAAAPTSPYATSRSDYPYWGQGTQVTVSS

SEQ ID NO: 1647 - protein, 125 aa, synthetic construct
  REGION 1..125: note = Synthetic Construct
AEVQLVESGGGLVQAGGSLRLSCAASGRTFSTSHMGWFRQAPGKEREFVAVISRSGGSTLDADSVKGRFTISRDNAKNTVYLQMNSLKPEDTAVYYCAASRTAGLTSNRYLYDYWGQGTQVTVSS

SEQ ID NO: 1648 - protein, 128 aa, synthetic construct
  REGION 1..128: note = Synthetic Construct
ADVQLVESGGGLVHAGGSLRLSCAASGRTLMNYHMGWLRQAPGKEREFVAAITWNGDTTEYADSVKGRFTISRDNAKNMVSLQMNSLKPEDTGVYYCAAPRPSYGSPLQRQPSGYDYWGQGTQVTVSS

SEQ ID NO: 1649 - protein, 129 aa, synthetic construct
  REGION 1..129: note = Synthetic Construct
ADVQLVESGGGLVRPGESLRLSCAASGGAFSRYDMGWFRQAPGKEREFVIAVARNGAKTYASDSVKGRFTISRDNSKNTVLLQMNSLKFDDTAVYYCAADTNPKYALHASDQSRDYDTWGRGTQVTVSS

SEQ ID NO: 1650 - protein, 125 aa, synthetic construct
  REGION 1..125: note = Synthetic Construct
AEVQLVESGGGLVQAGGSLRLSCAASGRTFSNYHMGWFRQAPGKEREFVVVISRSGGSTLDADSVKGRFTISRDNAKNTVYFEMNSLKPEDTAVYYCAASRTAGLTSNPSLYEYWGQGTQVTVSS

SEQ ID NO: 1651 - protein, 132 aa, synthetic construct
  REGION 1..132: note = Synthetic Construct
ADVQLVESGGGLVQAGGSLRLSCAASGSIFSILNMGWYRQAPGKEREGVSGITWRDGRTFYARSVEGRFTISRDNGRNTVYLQMNALKPEDTAVYYCATAPKSSITAAQAMGVMEGREYSYWGQGTQVTVSS

SEQ ID NO: 1652 - protein, 126 aa, synthetic construct
  REGION 1..126: note = Synthetic Construct
AQVQLVESGGGLVQAGGSLRLSCAASGRTFRSYNMGWFRQAPGKEREFVAALSWTGVGTYYADSVKGRFTISRDITKNTVYLQMDSLKPEDTAVYYCAADSNTDRLHSAGTEYRYWGQGTQVTVSS

SEQ ID NO: 1653 - protein, 117 aa, synthetic construct
  REGION 1..117: note = Synthetic Construct
ADVQLVESGGGLVQAGGSLRLSCAVSGSTLGINAIGWYRQPPGKQRELVASISSLGTTLYAESVKGRFAISRDNAKNTGYLQMNSLKPDDTAVYYCNMRTPYMRYYWGQGTQVTVSS

SEQ ID NO: 1654 - protein, 123 aa, synthetic construct
  REGION 1..123: note = Synthetic Construct
ADVQLVESGGGLVQAGGSLRLSCVVSGRTNSDFRVGWFRQAPGKDREFVALISQTGGTTGYADSVKGRFTISRDNAANTVFLQMNSLKPEDTAVYYCAGGRIISTAPRDYEYWGQGTQVTVSS

SEQ ID NO: 1655 - protein, 126 aa, synthetic construct
  REGION 1..126: note = Synthetic Construct
AHVQLVESGGGLVQPGGSLRLSCAASGFTFANYVMSWVRQAPGKRLEWVSAINRDSSTNYAHSVKGRFTISRDNAKNTLYLQMNSLKSEDTAVYYCAKRPAPYTDYDPTNSEYDYWGQGTQVTVSS

SEQ ID NO: 1656 - protein, 117 aa, synthetic construct
  REGION 1..117: note = Synthetic Construct
AEVQLVESGGGLVQAGGSLRLSCAVSGSTLGINAIGWYRQPPGKQRELVASISSLGTTLYAESVKGRFAISRDNAKNTAYLQMNSLKPDDTAVYYCNMRTPYMQDYWGQGTQVTVSS

SEQ ID NO: 1657 - protein, 124 aa, synthetic construct
  REGION 1..124: note = Synthetic Construct
ADVQLVESGGGLVQAGGSLRLSCTASGRFFSVSGVGWYRQAPGEERDLVAAITSGGTVKYADSVKGRFTISRDNAKNMLYLQMNSLKPEDTAVYYCKAEHTVVGGGDLRVDDYWGQGTQVTVSS

SEQ ID NO: 1658 - protein, 128 aa, synthetic construct
  REGION 1..128: note = Synthetic Construct
AQVQLVESGGGLVHAGGSLRLSCAASGRTLMNYHMGWLRQAPGKEREFVAAITWNGDTTEYADSVKGRFTISRDNAKNMVSLQMNSLKPEDTGVYYCAASRPSYGSHLQRQPSGYDYWGQGTQVTVSS

SEQ ID NO: 1659 - protein, 126 aa, synthetic construct
  REGION 1..126: note = Synthetic Construct
AQVQLVESGGGLVQAGGSLRLSCAASGRTVSTYVMAWFRQAAGKEREFVAHISWTGDETNYADSVRGRFTISRDNAKNTVYLQMNSLKPEDTAVYYCAADRGYSLYYYSSREYGYWGQGTQVTVSS

SEQ ID NO: 1660 - protein, 123 aa, synthetic construct
  REGION 1..123: note = Synthetic Construct
AQVQLVESGGGLVQTGGSLRLSCTDPGYTLDWYAISWFRQAPGKEREAISCITSDGSTKYADSVKGRFTISRDKAKNAVYLQMDSLKLEDTAVYHCATDRIFDCVLYGNYDFRGQGTQVTVSS

SEQ ID NO: 1661 - protein, 125 aa, synthetic construct
  REGION 1..125: note = Synthetic Construct
AHVQLVESGGGSVQTGGSLRLSCAASGTIHRIYDMGWYRQAPGKQRELVATTSIAPSRTNYADSVKDRFTISRDDAKNTVYLQTSSLKPDDTAVYSCAADLTVLLTANPRHYNYWGQGTQVTVSS

SEQ ID NO: 1662 - protein, 123 aa, synthetic construct
  REGION 1..123: note = Synthetic Construct
ADVQLVESGGGLVQAGGSLRLSCAVSGRTFSIAGMGWFRQAPGKDREFLGGITWNDGTTWYADSVKGRFTISRDNAKNMLSLRMNSLKPEDTAVYYCAAGPRLGSTPRAYDYWGQGTQVTVSS

SEQ ID NO: 1663 - protein, 122 aa, synthetic construct
  REGION 1..122: note = Synthetic Construct
AHVQLVESGGGLVQAGGSLRLSCAASGRFSTSAMGWFRQAPGKEREFVAGISWSGANIHYADTVKGRFSISTDTAKTRIYLQMNSLKPEDTAVYYCVQGGWGIIQPISVDYWGKGTQVTVSS

SEQ ID NO: 1664 - protein, 127 aa, synthetic construct
  REGION 1..127: note = Synthetic Construct
AQVQLVESGGGLVQAGGSLRLSCAASGFTFSEYAMYWARQAPGKGREWVSGIYSDGSDTAYASSVKGRFTISRDNAKNTLYLQMNNLKPEDTALYYCAKSKDRYGSAWERREFDDDWGQGTQVTVSS

SEQ ID NO: 1665 - protein, 128 aa, synthetic construct
  REGION 1..128: note = Synthetic Construct
AEVQLVESGGGLVQAGGSLRLSCAASGRTFSSYNVGWFRQAPGKEREFVAFIRWSGTSTYYADSVKGRFTISRDNAKNTVYLQMNSLKPEDTAVYYCAATSRTMIHTSQAMPINWDYWGQGTQVTVSS

SEQ ID NO: 1666 - protein, 130 aa, synthetic construct
  REGION 1..130: note = Synthetic Construct
AHVQLVESGGGLVQAGGSLRLSCAASGRTFSTYTMGWFRQAPGKEREFVAAISRSGGSTYYADSVRGRFTISRDNAKNTVYLQMNSLKPEDTAVYYCAADQSGGSAYYTRRRAQAGYDYWGQGTQVTVSS

SEQ ID NO: 1667 - protein, 123 aa, synthetic construct
  REGION 1..123: note = Synthetic Construct
AEVQLVESGGGLVQAGGSLTLSCAASGRTFSSHAMAWFRQAPGKEREFVAGISWSGPYYVDSVKGRFTISTDNAKNTVYLQMNSLTPEDTAVYYCASSRGPNLYPHIGDVEYWGQGTQVTVSS

SEQ ID NO: 1668 - protein, 122 aa, synthetic construct
  REGION 1..122: note = Synthetic Construct
AQVQLVESGGGLVQAGGSLRLSCAASGSIFSINTMGWYRQAPGKQRELVAAITSGGNTNYADSVKGRFTISRDNAKNTVYLQMNSLKPEDTAVYYCNGVAYDYSWGGPRNYWGQGTQVTVSS

SEQ ID NO: 1669 - protein, 129 aa, synthetic construct
  REGION 1..129: note = Synthetic Construct
AHVQLVESGGGLVQAGGSLRLSCRRASGRTFSNYAMGWFRQAPGKEREFVAAISWRGSSTNYGDFVKGRFTISRDVADNTVYLQMNSLKPEDTAVYYCAAYSTSHYYYTEIRGSEYDYWGQGTQVTVSS

SEQ ID NO: 1670 - protein, 128 aa, synthetic construct
  REGION 1..128: note = Synthetic Construct
AHVQLVESGGGLVQAGGSLRLSCAASGRAFITFSINSIAWFRQAPGKEREFVAVLEWRSGSTYHADSVKGRFAISKDNAKNTVDLQMNNLKPEDTAVYYCAGANWFGRSDDAGQYAYWGQGTQVTVSS

SEQ ID NO: 1671 - protein, 129 aa, synthetic construct
  REGION 1..129: note = Synthetic Construct
AHVQLVESGGGLVQAGGSLSLSCAASGGAFSRYDMGWFRQAPGKEREFVIAIARNGAKTYASDSVKGRFTISRDNAKNTVLLHMGNLKFDDTAVYYCAADTNPKYALHATDQSRDYDTWGRGTQVTVSS

SEQ ID NO: 1672 - protein, 127 aa, synthetic construct
  REGION 1..127: note = Synthetic Construct
ADVQLVESGGGLVQAGGSLRLTCAASGGTFSTSTMDMGWFRQAPGKEREFVAVDSWNDGRAYYADSVKGRFTISRDSAKTTLYLQMNSLMPDDTAVYYCKMNIGDYMRDPYTGYETWGQGTQVTVSS

SEQ ID NO: 1673 - protein, 125 aa, synthetic construct
  REGION 1..125: note = Synthetic Construct
AEVQLVESGGGLVHAGGSLRLSCAASGRTLMNYHMGWLRQAPGKEREFVAAITWNGDATEYADSVKGRFTISRDNVKNVLYLQMNSLKPEDTAVYYCAADKWAVAHSDWAQYDYWGQGTQVTVSS

SEQ ID NO: 1674 - protein, 124 aa, synthetic construct
  REGION 1..124: note = Synthetic Construct
AEVQLVESGGGLVQAGGSLRLTCAASGGTFSSSTMDMGWFRQAPGKEREFVAAHSWNDGRTYYATSVKGRFTISRDNAKTTLYLQMNSLKPEDTAVYYCAADTYSNYEKDYSSWGQGTQVTVSS

SEQ ID NO: 1675 - protein, 130 aa, synthetic construct
  REGION 1..130: note = Synthetic Construct
ADVQLVESGGGLVQAGGSLRLTCAASGGTFSTSTMDMGWFRQAPGKEREFVAVDSWNDGRAYYADSVKGRFTISRDSAKTTLYLQMNSLKPEDTAVYYCAADITSWAMDPIYSTSRYDYWGQGTQVTVSS

SEQ ID NO: 1676 - protein, 123 aa, synthetic construct
  REGION 1..123: note = Synthetic Construct
ADVQLVESGGGLVQAGGSLRLSCAVSGRTVSSYVMGWFRQAPGKEREFVAGIGRTGMTITADSVKGRFTISRDNAKNLVYLQMNSLKSEDTAVYWCAAGVRDFAPRIDSYDYWGQGTQVTVSS

SEQ ID NO: 1677 - protein, 117 aa, synthetic construct
  REGION 1..117: note = Synthetic Construct
AHVQLVESGGGLVQAGGSLRLSCAVSGSTLGINAIGWYRQPPGKQRELVASISSLGTTLYAESVKGRFAISRDNAKNTAYLQMNSLKPDDTAVYYCNMRTPYMRAYWGQGTQVTVSS

SEQ ID NO: 1678 - protein, 128 aa, synthetic construct
  REGION 1..128: note = Synthetic Construct
AQVQLVESGGGLVQAGGSLRLSCAASGRTFSRYAAGWFRQAPGKEREFVAVIEWNGGTAYYTDSVKGRFTISRDNANNTVYLQMNRLKPEDTAVYICAVGGNHYSRTKYYTADEYDYWGQGTQVTVSS

SEQ ID NO: 1679 - protein, 128 aa, synthetic construct
  REGION 1..128: note = Synthetic Construct
AQVQLVESGGGLVQTGGSLRLSCAVSGYTFSTFPTAWFRQAPGKEREFVAGIRWNGISRNYLEYADFVKGRFTISRDNAKNMMYLQMSSLKPEDTALYYCAASHGVVDGTSVNAYRYWGQGTQVTVSS

SEQ ID NO: 1680 - protein, 124 aa, synthetic construct
  REGION 1..124: note = Synthetic Construct
AHVQLVESGGGLVQPGGSLRLSCVVSGLIFDEPNIGWFRQAPGKDREAVSCVSGDESGTYYGDSVKGRFTISRDKAKRTIYLQMNSLKPEDTAMYYCTIQRSCHLPFNPTHDWRGQGTQVTVSS

SEQ ID NO: 1681 - protein, 123 aa, synthetic construct
  REGION 1..123: note = Synthetic Construct
AHVQLVESGGGLVQPGGSLRLSCAASGSIFSANVMGWYRQTPGKQRELVASITNTGTAYYTDSVKGRFAISRDNGKNTVYLQMNSLKPEDTAVYYCAADPRYDYYIPSSYNYWGQGTQVTVSS

SEQ ID NO: 1682 - protein, 128 aa, synthetic construct
  REGION 1..128: note = Synthetic Construct
AQVQLVESGGGLVHAGGSLRLSCAASGRTLMNYHMGWLRQAPGKEREFVAAITWNGDTTEYADSVKGRFTISRDNAKNMVSLQMNSLKPEDTGVYYCAASRPSYGSPLQRQSSGYDYWGQGTQVTVSS

SEQ ID NO: 1683 - protein, 127 aa, synthetic construct
  REGION 1..127: note = Synthetic Construct
AQVQLVESGGGLVQPGGSLRLSCAASGFTFSNYVMYWGRQAPGKGREWVSGIDSDGSDTAYASSVKGRFTISRDNAKKTLYLQMNDLKPEDTALYYCVKSKDRYGSPWTRSEFEDYWGQGTQVTVSS

SEQ ID NO: 1684 - protein, 125 aa, synthetic construct
  REGION 1..125: note = Synthetic Construct
ADVQLVESGGGLVQAGGSLRLSCAASGRTFSNYHMGWFRQAPGKEREFVAVISRSGGSTLDADSVKGRFTMSRDNAKMTVDLQMNSLKPEDTAVYYCAASRTAGLTSNRALYDYWGQGTQVTVSS

SEQ ID NO: 1685 - protein, 128 aa, synthetic construct
  REGION 1..128: note = Synthetic Construct
AHVQLVESGGGLVHAGGSLRLSCAASGRTLMNYHMGWLRQAPGKEREFVAAITWNGDTTEYADSVKGRFTISRDNAKNMVSLQMNSLKPEDTGVYYCAASRPSYGSPLRRQPSGYDYWGQGTQVTVSS

SEQ ID NO: 1686 - protein, 128 aa, synthetic construct
  REGION 1..128: note = Synthetic Construct
AQVQLVESGGGLVQAGGSLRLSCAASGRTFSNSHMGWFRQAPGKEREFVAVISRSGGSTLYADSVKGRFTISRDNAKNTVYLQMNSLKPEDTAVYYCAADRHVCSDYACGESSAYDYWGQGTQVTVSS

SEQ ID NO: 1687 - protein, 130 aa, synthetic construct
  REGION 1..130: note = Synthetic Construct
AQVQLVESGGGLVQAGGSLRLSCVVSTRTFSTDIVGWFRQAPGKEREFVGRLYRSSGNTYYADSVKGRFTISRDNAKNTVYLQMNSLKPEDTAVYYCSTFSGRSQYYCSGYESLRDYDYWGQGTQVTVSS

SEQ ID NO: 1688 - protein, 130 aa, synthetic construct
  REGION 1..130: note = Synthetic Construct
AEVQLVESGGGLVQAGGSLRLSCAASADTISNWPMAWFRQAPGKEREFVAAISWSGSTTYYADSVKGRFTMSRDNAKATADLQMNSLNAEDTAVYYCAAAHGRVYGSRWFSSNRYDYPDWGQGTQVTVSS

SEQ ID NO: 1689 - protein, 125 aa, synthetic construct
  REGION 1..125: note = Synthetic Construct
AEVQLVESGGGLAQSGDSLRLSCAASGRTFDINYMAWFRRAPGKEREFVCTTKWSGEDTYCDGSVQGRFTISRDNAKNSVYLQMDSLQPEDSAVYYCAARLFPGIATSSLDYSYWGQGTQVTVSS

SEQ ID NO: 1690 - protein, 129 aa, synthetic construct
  REGION 1..129: note = Synthetic Construct
AHVQLVESGGGLVQAGDSLRLSCVASGRTFSSSAMGWFRQAPGKEREFVAGISRRGGSTFYADSVKGRFTVSRDNAKNTVALEMNSLKPEDTAVYYCAADIDPPGMYAVTYNYRNYDYWGQGTQVTVSS

SEQ ID NO: 1691 - protein, 128 aa, synthetic construct
  REGION 1..128: note = Synthetic Construct
AHVQLVESGGKLVPAGGSLRLSCAASGRAFITFSINTIAWFRQAPGKEREFVAVLEWGSGSTYHADSVKGRFAISKDNAKNTVDLQMNSLKPEDTAVYYCAGANWFGRSDDAGQYDYWGQGTQVTVSS

SEQ ID NO: 1692 - protein, 120 aa, synthetic construct
  REGION 1..120: note = Synthetic Construct
AQVQLVESGGGLVQAGGSLRLSCAASGSIFSSNAMSWYRQAPGKQRELVASITSGGNTAYADSVKGRFTISRDKNTVYLEMSSLKPADTAVYYCNAVGQEASAYAPRNYWGQGTQVTVSS

SEQ ID NO: 1693 - protein, 125 aa, synthetic construct
  REGION 1..125: note = Synthetic Construct
AHVQLVESGGGLVQAGGSLRLTCAASGGTFSTSTMDMGWFRQAPGKEREFVAVDSWNDGRAYYADSVKGRFTISRDSAKTTLYLQMNSLKPEDTAVYYCAADSREFGPIGQYDYWGQGTQVTVSS

SEQ ID NO: 1694 - protein, 117 aa, synthetic construct
  REGION 1..117: note = Synthetic Construct
AQVQLVESGGGLVQAGGSLRLSCAASGRTFSSYAMGWFRQAPGKEREFVAAISWSGGSTYYADSVKGRFTISRDSAKSTVTLQMNSLKPEDTAVYYCNTEDILGTSWGQGTQVTVSS

SEQ ID NO: 1695 - protein, 130 aa, synthetic construct
  REGION 1..130: note = Synthetic Construct
AHVQLVESGGGLVQTGGSLRLSCAASADTISNWPMAWFRQAPGKEREFVAAISWSGSTTYYADSVKDRFTMSRDNAKATAGLQMNSLKPEDTAVYYCAAAHGRVYGSRWFSTNPYDYPSWGQGTQVTVSS

SEQ ID NO: 1696 - protein, 127 aa, synthetic construct
  REGION 1..127: note = Synthetic Construct
ADVQLVESGGGLVQPGGSLRLSCAASGRTYSSYRMGWFRQAPGKEREFVATINRSGDSTSYADSVKGRFTISRDNAKNTVYLQMNSLEPADTAVYYCAADLLPGTYLHTAQNAYAYWGQGTQVTVSS

SEQ ID NO: 1697 - protein, 130 aa, synthetic construct
  REGION 1..130: note = Synthetic Construct
AHVQLVESGGGLVQPGGSLRLSCAASGFTLADYAIGWFRQAPGKEREGVSCISSGDGSTVYADSVKGRFTISRDNAGNTAYLQMNSLKPEDTAVYYCATFSGRSQYYCSGYGSLRDFDYWGQGTQVTVSS

SEQ ID NO: 1698 - protein, 128 aa, synthetic construct
  REGION 1..128: note = Synthetic Construct
AEVQLVESGGGLVQAGDSLRLSCAAPGRTVSDYPMGWFRQAPGKERDVVAVISWSGDSTYYADSVKGRFTISRDNAKNLVYLQMNSLKPEDTAVYYCAAKSIMYYSRTYSRPSDYDYWGQGTQVTVSS

SEQ ID NO: 1699 - protein, 126 aa, synthetic construct
  REGION 1..126: note = Synthetic Construct
AHVQLVESGGGLVQAGGSLRLSCATSGRTFGPYRMSWFRQAPGKEREFVATIIWSAGSTYYADSVKGRFTTSRDNAKNMVYLQMNSLKPEDTAVYYCAAQRSDSYQRGYDDDYDYWGQGTQVTVSS

SEQ ID NO: 1700 - protein, 122 aa, synthetic construct
  REGION 1..122: note = Synthetic Construct
ADVQLVESGGGLVQIGGSLRLSCKATGDDFSDWGMAWFRQPPGKEREFVAGITWSGGSTYYADSTKGRFTISRDNAKNTVYLRMNSLKPEDTGVYRCAAGRIVAENADYDYWGQGTQVTVSS

SEQ ID NO: 1701 - protein, 118 aa, synthetic construct
  REGION 1..118: note = Synthetic Construct
AQVQLVESGGGLVQTGDSLRLSCVASGRTFRMGWFRQAPGKRREFVAAIGWDIRTTNYADSVKGRFTISGDGAKNTVYLQMTSLKSEDTAVYYCAARGTATSGEYDSWGQGTQVTVSS

SEQ ID NO: 1702 - protein, 117 aa, synthetic construct
  REGION 1..117: note = Synthetic Construct
ADVQLVESGGGLAQSGDSLRLSCAASGRTFDINYMAWFRRAPGKEREFVCTTKWSGEDTYCDGSVQGRFTISRDNAKNTVYLQMNSLKPEDTAVYYCKVPSMGYDYWGQGTQVTVSS

SEQ ID NO: 1703 - protein, 131 aa, synthetic construct
  REGION 1..131: note = Synthetic Construct
AEVQLVESGGGLVQPGGSLRLSCAASGFTLDYYAIGWFRQAPGKEREGVSCISSSNDSTTYADSVKGRFTISRDNAKNTVYLQMNSLKPEDTAVYYCATGALTYYSGRYYLTCHPDGMDYWGKGTQVTVSS

SEQ ID NO: 1704 - protein, 125 aa, synthetic construct
  REGION 1..125: note = Synthetic Construct
AEVQLVESGGGLAQSGDSLRLSCAASGRTFDINYMAWFRRAPGKEREFVCTTKWSGEDTYCDGSVQGRFTISRDNAKNSVYLQMDSLQPEDSAVYYCAARLFPGIATSSLDYSAWGQGTQVTVSS

SEQ ID NO: 1705 - protein, 127 aa, synthetic construct
  REGION 1..127: note = Synthetic Construct
AEVQLVESGGGLVQAGDSLTLSCAASGRAFSSYTMGWFRQAPGKEREFVAAIRWSSARTLYADSAKGRFTISRDDAKNTVYLQMNSLKPEDTAVYYCATDTLSMGNSVTDAHRYGYWGRGTQVTVSS

SEQ ID NO: 1706 - protein, 124 aa, synthetic construct
  REGION 1..124: note = Synthetic Construct
ADVQLVESGGGLVQAGGSLRLTCAASGGTFSTSTMDMGWFRQAPGKEREFVAVDSWNDGRAYYADSVKGRFTISRDSAKTTLYLQMNSLKPEDTAVYYCATGVGVIVPFTAASWGQGTQVTVSS

SEQ ID NO: 1707 - protein, 125 aa, synthetic construct
  REGION 1..125: note = Synthetic Construct
AQVQLVESGGGLVQAGGSLRLSCTATVRTFNLAAMGWFRQTPGKERQLVAEINWAADRTDYLDSVKGRFTISRDNAKKTVYLQMNNLKPEDTAVYYCALDQTTSSFTGARDVDYWGQGTQVTVSS

SEQ ID NO: 1708 - protein, 126 aa, synthetic construct
  REGION 1..126: note = Synthetic Construct
AHVQLVESGGGLVQAGGSLRLSCAASGRTLRSYNMGWFRQAPGKEREFVAALSWTGVGTYYGDSVEGRFTISRDVTKNTLYLQMDSLKPEDTAIYYCAADSTIDRLHSAGSDYYYWGQGTQVTVSS

SEQ ID NO: 1709 - protein, 119 aa, synthetic construct
  REGION 1..119: note = Synthetic Construct
AHVQLVESGGGLVQAGGSLRLTCAASGGTFSTSTMDMGWFRQAPGKEREFVAVDSWNDGRAYYADSVKGRFTISRDSAKTTLYLQMNNLKPEDTAVYYCNAWQGNTRYWGQGTQVTVSS

SEQ ID NO: 1710 - protein, 127 aa, synthetic construct
  REGION 1..127: note = Synthetic Construct
AHVQLVESGGGLVQAGGSLRLSCAASGRFFSSYSMGWFRQARGKEREFVAAINWNDRGTHYTPSVKGRFTISRDDATNTVYLQMNSLKPEDTAIYYCAADKDVYYGYTLHPNEYEYWGQGTQVTVSS

SEQ ID NO: 1711 - protein, 121 aa, synthetic construct
  REGION 1..121: note = Synthetic Construct
AQVQLVESGGGLVQAGGSLKLSCTASESTFNFNHIDWYRQAPGKQRESVAVITNTDVTNYADSVKGRFTISRDNAKNTVYLQMNSLKPEDTAVYLCNAWRFGPTGVKVDYWGQGTQVTVSS

SEQ ID NO: 1712 - protein, 126 aa, synthetic construct
  REGION 1..126: note = Synthetic Construct
ADVQLVESGGGLVQAGGSLRLTCAASGGTFSTSTMDMGWFRQAPGKEREFVAVDSWNDGRAYYADSVKGRFTISRDSAKTTLYLQMNSLKPEDTAVYYCAAETYSNYEKHYSWGYWGQGTQVTVSS

SEQ ID NO: 1713 - protein, 124 aa, synthetic construct
  REGION 1..124: note = Synthetic Construct
ADVQLVESGGGLVQAGGSLRLTCAASGGTFSTSTMDMGWFRQAPGKEREFVAVDSWNDGRAYYADSVKGRFTISRDSAKTTLYLQMNSLKPEDTAVYYCAAETYSNYEKDYSSWGQGTQVTVSS

SEQ ID NO: 1714 - protein, 123 aa, synthetic construct
  REGION 1..123: note = Synthetic Construct
AHVQLVESGGGLVQTGGSLRLSCAASGRTFDINYMGWFRRAPGKEREFVCTIKWSGEDRYCADSGRWTISRDNAKDTVYLQMNSLTPEDTAVYYCAARIFPGIATSSLDYSSWGQGTQVTVSS

SEQ ID NO: 1715 - protein, 117 aa, synthetic construct
  REGION 1..117: note = Synthetic Construct
AQVQLVESGGGLVQAGGSLRLSCAVSGSTLGINAIGWYRQPPGKQRELVASISSLGTTLYAESVKGRFAISRDNAKNTAYLQMNSLKPDDTAVYYCNMRTPYMWDYWGQGTQVTVSS

SEQ ID NO: 1716 - protein, 126 aa, synthetic construct
  REGION 1..126: note = Synthetic Construct
AHVQLVESGGGLVQAGGSLRLSCAASGRTLRSYNMGWFRQAPGKEREFVAASSWTGVGTYYADSVQGRFTISRDNNKNILYLQMDSLKPEDTAVYYCAADTTTYRLHSAGSDYRYWGQGTQVTVSS

SEQ ID NO: 1717 - protein, 128 aa, synthetic construct
  REGION 1..128: note = Synthetic Construct
AEVQLVESGGGLVQAGGSLRLTCAASGGTFSTSTMDMGWFRQAPGKEREFVAVDSWNDGRAYYADSVKGRFTISKDNAKNAVYLQMNSLKPADTAVYYCAGGRPDSGTYYIPDEYIYWGQGTQVTVSS

SEQ ID NO: 1718 - protein, 125 aa, synthetic construct
  REGION 1..125: note = Synthetic Construct
AQVQLVESGGGLVQAGGSLRLSCAASGRTFSSYAMGWFRQAPGKERELVAGINWAADRTYYADAVKGRFTITRDIAKNTVYLHMNNLKPEDTNVYYCALDQTTSTFTGASDVNYWGQGTQVTVSS

SEQ ID NO: 1719 - protein, 127 aa, synthetic construct
  REGION 1..127: note = Synthetic Construct
AHVQLVESGGGLVQAGDSLRLSCAASERTNINYAMGWFRQAPGKERDFVAAIGWNGSIIKYAESVKGRFTISRDDAKNTVSLQMNSLKPEDTAVYYCAARIGSIANLQPREYEFAYWGQGTQVTVSS

SEQ ID NO: 1720 - protein, 125 aa, synthetic construct
  REGION 1..125: note = Synthetic Construct
ADVQLVESGGGLVQAGDSLRLSCAASGRTLSRDAMGWFRQAPGKEREFVATISASGGSTNYADSVKGRFTISRDNAENTLYLQMNSLKPEDTAVYYCATRSYPNTSRYLAAYDYWGQGTQVTVSS

SEQ ID NO: 1721 - protein, 123 aa, synthetic construct
  REGION 1..123: note = Synthetic Construct
AHVQLVESGGGLVQPGGSLRLSCAASGRSFNSYLMGWFRQAPGKEREFVAWISGSPHDIIRYRDSVKDRFTISRDNAKNTVYLQMNSLKPVDTAVYYCAVGSLRVGSFSPDYWGQGTQVTVSS

SEQ ID NO: 1722 - protein, 126 aa, synthetic construct
  REGION 1..126: note = Synthetic Construct
AEVQLVESGGGLVQAGDSLRLSCAASEPSFSRYSMAWFRQAPGKERDIVAAITQTGFGTYYTDSVKGRFTISRDNAKNTMYLQMNSLKPEDTAVYYCAAKYGYLQPMGRDTVIDYWGQGTQVTVSS

SEQ ID NO: 1723 - protein, 110 aa, synthetic construct
  REGION 1..110: note = Synthetic Construct
AQVQLVESGRTLMNYHMGWLRQAPGKEREFVAAITWNGDTTEYADSVKGRFTISRDNAKNMVSLQMNSLKPEDTGVYYCAASRPSYGSPLQRQPSGYDYWGQGTQVTVSS

SEQ ID NO: 1724 - protein, 123 aa, synthetic construct
  REGION 1..123: note = Synthetic Construct
AHVQLVESGGGLVQPGGSLRLSCAASGRSFSSYLMGWFRQAPGKEREFVAWISGSPHDIIRYRDSVKDRFTISRDNAKNTVYLQMNSLKPEDTAVYYCAVGSLRVGSFSVDYWGQGTQVTVSS

SEQ ID NO: 1725 - protein, 120 aa, synthetic construct
  REGION 1..120: note = Synthetic Construct
AQVQLVESGGGLVQAGGSLRLSCAASGRTFGNYRMAWWRQTPGKERYIVAAITLSADTTYYADSVKGRFTISRDNTKNTVYLEMNSLKPEDTAVYYCAARNPSTAEYDYWGQGTQVTVSS

SEQ ID NO: 1726 - protein, 126 aa, synthetic construct
  REGION 1..126: note = Synthetic Construct
AHVQLVESGGGLVRTGDSLRLSCTASGRTLSGYAMGWFRRPAGKDHEFLATINWDSERTYYTDSVEGRFTMSKGSARNTVYLQMNNLKPSDTAMYYCAAKTEAHYTPIHDYEYDVMGRGTQVTVSS

SEQ ID NO: 1727 - protein, 128 aa, synthetic construct
  REGION 1..128: note = Synthetic Construct
ADVQLVESGGGLVQAGGSLRLSCAASGRTLMNYHMGWFRQAPGKEREFVAAITWNGDATNYADSKKGRFTISRDNAKNMVSLQMNSLKPEDTGVYYCAAARPSYGLPLQRQPSGYDYWGQGTQVTVSS

SEQ ID NO: 1728 - protein, 128 aa, synthetic construct
  REGION 1..128: note = Synthetic Construct
ADVQLVESGGGLVQAGGSLRLSCAASGRTFSSYNMGWFRQAPGKEREFVATLSWTGVGTYYTDSVKGRFTISRDNAKNTVYLQMNSLKPEDTAVYYCAAPGTPYSGRLYSNDYEYDYWGQGTQVTVSS

SEQ ID NO: 1729 - protein, 104 aa, synthetic construct
  REGION 1..104: note = Synthetic Construct
AQVQLVESGGGLVQAGGSLRLSCAVSGRTGSRTYYADSVKGRFTISRDNAKNTVFLQMASLKPEDTAVYYCAAAHARVYGANWSSSNRYDYDSWGQGTQVTVSS

SEQ ID NO: 1730 - protein, 126 aa, synthetic construct
  REGION 1..126: note = Synthetic Construct
AQVQLVESGGGLVQAGGSLRLSCVASGSGFEPNAMGWYRQAPGKQRELVAGITSGGNANYADSVKGRFTISRDNAKNTVYLQMNSLKFEDTAVYYCAGAPYYSGRYYYNGGNYDYWGQGTQVTVSS

SEQ ID NO: 1731 - protein, 129 aa, synthetic construct
  REGION 1..129: note = Synthetic Construct
AHVQLVESGGGLVQAGGSLRLSCAASGGTFSRYDMGWFRHTPGKEREFVIAIARNGAKTYASDSVKRRFTVSRDNAKNAVLLQMNNLKPEDTAVYYCAADTDPKYALHASDQSRDYDYWGRGTQVTVSS

SEQ ID NO: 1732 - protein, 130 aa, synthetic construct
  REGION 1..130: note = Synthetic Construct
AQVQLVESGGGLVQAGGSLRLSCAASGRTFSPYPMGWFRQAPGKERDFVAAISWSGDTTYYTDSVKGRFTISRDNAKNTVYLQMNSLKPEDTAVYYCGVSYGNVYGRSWTGKNIHDYTQWGQGTQVTVSS

SEQ ID NO: 1733 - protein, 127 aa, synthetic construct
  REGION 1..127: note = Synthetic Construct
AEVQLVESGGGLVQAGGSLRLSCAASGRTFSSYSVGWFRQAQGKERDFVAAINSNDRGTHYTSSVKGRFTISRDDATNTVYLQMNSLKPEDTAIYYCAADKDVYYGYTSHPNEYEYWGQGTQVTVSS

SEQ ID NO: 1734 - protein, 128 aa, synthetic construct
  REGION 1..128: note = Synthetic Construct
AEVQLVESGGGFVQAGGSLRLSCAASGRTFSRYAAGWFRQAPGKEREFLAVIEWNGGSRYYADSVKGRFTISRDNAKNTVYLEMNRLKPEDTAVYICAVGGNHYSSTKYYTADEYDYWGQGTQVTVSS

SEQ ID NO: 1735 - protein, 123 aa, synthetic construct
  REGION 1..123: note = Synthetic Construct
ADVQLVESGGGLVQAGGSLRLSCAAPGRTFSTSAMGWFRQAPGKEREFVAAIDWSGANTHYADTVKGRFTISTDTAKNTVYLQMNNLKPEDTAIYYCAQGGWGLRQPISVDYWGKGTQVTVSS

SEQ ID NO: 1736 - protein, 126 aa, synthetic construct
  REGION 1..126: note = Synthetic Construct
AEVQLVESGGGLVQAGGSLRLTCAASGGTFSTSTMDMGWFRQAPGKEREFVAVDSWNDGRAYYADSVKGRFTISRDSAKTTLYLQMNSLKPEDTAVYYCAAETYSNYEKDYPWGYWGQGTQVTVSS

SEQ ID NO: 1737 - protein, 134 aa, synthetic construct
  REGION 1..134: note = Synthetic Construct
AQVQLVESGGGLVQPGGSLRLSCAASGFYLDDYAVFWFRQAPGKEREGLSCIKGAGTSTYYLDSVKGRFTSSRDNAKNMLYLQMSSLKPEDTAVYSCAVVSDIFVRSCDDETMASIESSAFTYWGQGTQVTVSS

SEQ ID NO: 1738 - protein, 127 aa, synthetic construct
  REGION 1..127: note = Synthetic Construct
AQVQLVESGGGLVQAGGSLRLSCAASGGNWPTGWFRQAPGKEREFVAAISWSGGSTYYADSVKGRFTISRDNAKATVDLQMNSLKPEDTAVYYCAAAHGRVYGSTWYSSNRWDYSAWGQGTQVTVSS

SEQ ID NO: 1739 - protein, 130 aa, synthetic construct
  REGION 1..130: note = Synthetic Construct
ADVQLVESGGGLVQAGDSLRLACAASGRTFDTHATGWFRQAPGKEREFLATSVWLGDISRDSTYYAESVKGRFTISRDNAKNTVYLQMNSLKPEDTALYYCAVRQAVGPGIMSAATYDYWGQGTQVTVSS

SEQ ID NO: 1740 - protein, 117 aa, synthetic construct
  REGION 1..117: note = Synthetic Construct
AHVQLVESGGGLVQAGGSLRLSCAVSGSTLGINAIGWYRQPPGKQRELVASISSLGTTLYAESVKGRFAISRDNAKNTGYLQMNSLKPDDTAVYYCNMRTPYMRNYWGQGTQVTVSS

SEQ ID NO: 1741 - protein, 125 aa, synthetic construct
  REGION 1..125: note = Synthetic Construct
AQVQLVESGGGLVQAGGSLRLSCAASGRTFSNYAVGWFRLAPGEDREFVAAINWSGSERYSVDSVKGRFIISRDNAKNTVYLQMNSLKPEDTARYYCAARSAGNIESRPGQYDDWGQGTQVTVSS

SEQ ID NO: 1742 - protein, 133 aa, synthetic construct
  REGION 1..133: note = Synthetic Construct
AQVQLVESGGGLVQPGGSLRLSCATSGIDLDFHAIGWFRQAPGKKREGVSCISWRDGRTYYEDSVVKGRFTISRDTARNTVYLQMSMLNAEDTAVYYCAAGPKSSLTAAQAMGVMEGRNYIHWGQGTQVTVSS

SEQ ID NO: 1743 - protein, 130 aa, synthetic construct
  REGION 1..130: note = Synthetic Construct
AQVQLVESGGGLVQPGGSLRLSCAASGFTLDDYAIGWFRQAPGKEREGVSCMSSGDGSTVYADSVKGRFTISRDNAKNTVYLQMNSLKPEDTAVYYCSTFSGRSQYYCSGYESLRQYDYWGQGTQVTVSS

SEQ ID NO: 1744 - protein, 125 aa, synthetic construct
  REGION 1..125: note = Synthetic Construct
AHVQLVESGGGLVQAGGSLRLSCAASGSIFSILNMGWYRQAPGKQRDLVARITPGGSTDYADSVKGRFTISRDNAKNTLYLQMNSLKPEDTAVYYCAADTTTDRLHSAGSDYRYWGQGTQVTVSS

SEQ ID NO: 1745 - protein, 126 aa, synthetic construct
  REGION 1..126: note = Synthetic Construct
ADVQLVESGGGLVQAGGSLRLTCAASGGTFSTSTMDMGWFRQAPGKEREFVAVDSWNDGRAYYADSVKGRFTISRDSAKTTLYLQMNSLKPEDTAVYYCAAETYSNYEKDYSCGYWGQGTQVTVSS

SEQ ID NO: 1746 - protein, 127 aa, synthetic construct
  REGION 1..127: note = Synthetic Construct
AHVQLVESGGGLVQAGGSLRLTCAASGGTFSTSTMDMGWFRQAPGKEREFVAVDSWNDGRAYYADSVKGRFTISRDNAKNTLYLQMNSLTAEDTAVYYCGSSRGPNLYAHIGDIEYWGQGTQVTVSS

SEQ ID NO: 1747 - protein, 129 aa, synthetic construct
  REGION 1..129: note = Synthetic Construct
AEVQLVESGGGLVQAGGSLRLTCAASGGTFSTSTMDMGWFRQAPGKEREFVAVDSWNDGRAYYADSVKGRFTISRDSAKTTLYLQMNSLKPEDTAVYYCAARSQFYSSNYDQVRSYDYWGQGTQVTVSS

SEQ ID NO: 1748 - protein, 121 aa, synthetic construct
  REGION 1..121: note = Synthetic Construct
AHVQLVESGGGLVQPGGSLRLSCAASGFTFGTYWMYWGRQAPGKGLEWVSSISPDGDSPLYADSVKGRFTISRDNAKNTVYLQMNSLKPEDTALYYCGRGLSVRSGQYDYRGQGTQVTVSS

SEQ ID NO: 1749 - protein, 128 aa, synthetic construct
  REGION 1..128: note = Synthetic Construct
AHVQLVESGGGLVQAGGSLRLSCAASGRTLMNYHMGWLRQAPGKEREFVAAITWNGDTTEYADSVKGRFTISRDNAKNMVSLQMNSLKPEDTGVYYCAASRPAYGSPLQRQPSGYDYWGQGTQVTVSS

SEQ ID NO: 1750 - protein, 128 aa, synthetic construct
  REGION 1..128: note = Synthetic Construct
AEVQLVESGGGLVQPGGSLRLSCAASGFTFSSYAMSWVRQAPGKGREWVAGITPGSGTFYADSVKGRFTISRDNAKNTLSLEINSLKPEDTALYYCAKCRQEFSWDFSSRDPDDFDYWGQGTQVTVSS

SEQ ID NO: 1751 - protein, 126 aa, synthetic construct
  REGION 1..126: note = Synthetic Construct
ADVQLVESGGGLVQAGGSLRLSCAASGRTFSTSIMGWFRQAPGKEREFVSAISRNGLATFYADSVKGRFTISRDNAKNTMYLQMNSLKPEDTGVYYCAAKPRGVGLTDRIQDYDYWGQGTQVTVSS

SEQ ID NO: 1752 - protein, 130 aa, synthetic construct
  REGION 1..130: note = Synthetic Construct
AQVQLVESGGGLVQAGGSLRLTCAASGGTFSTSTMDMGWFRQAPGKEREFVAVDSWNDGRAYYADSVKGRFTISRDSAKTTLYLQMNSLKPEDTAVYYCAASRPSYGAPLQRRPSGYDYWGQGTQVTVSS

SEQ ID NO: 1753 - protein, 120 aa, synthetic construct
  REGION 1..120: note = Synthetic Construct
AHVQLVESGGGLVQAGGSLRLSCAASGSIFSSNAMSWYRQAPGKQRELVASITSGGNAMYEDSVKGRFTISRDKNTVYLEMNSLKPADTAVYYCHAVGQEGSAYAPRVYWGQGTQVTVSS

SEQ ID NO: 1754 - protein, 130 aa, synthetic construct
  REGION 1..130: note = Synthetic Construct
AHVQLVESGGGLVQPGGSLRLSCAASGFTLDDYAIGWFRQAPGKEREGVSCMSSGDGSTVYADSVKGRFTISRDNAKNTVYLQMNSLKPEDTAVYYCSTFAGRSQYYCSGYESLRHYDYWGQGTQVTVSS

SEQ ID NO: 1755 - protein, 125 aa, synthetic construct
  REGION 1..125: note = Synthetic Construct
AHVQLVESGGGLVQAGDSLRLSCQASGRSGSNAFMGWFRQAPGKERIFVAAVRWTDGMTYYSNSVRGRFAASRDNAQNTVSLQMNSLQPEDSAVYYCAARRSGGELVNRDYCDYWGQGTQVTVSS

SEQ ID NO: 1756 - protein, 130 aa, synthetic construct
  REGION 1..130: note = Synthetic Construct
AHVQLVESGGGLVQPGGSLRLSCAASGFTLADYAIGWFRQAPGKEREGVSCISSGDGSTVYADSVKGRFTISRDNTGNTAYLQMNSLKPEDTAVYYCATFSGRSQYYCSDYGSLRDFDYWGQGTQVTVSS

SEQ ID NO: 1757 - protein, 140 aa, synthetic construct
  REGION 1..140: note = Synthetic Construct
ADVQLVESGGGLVQAGGSLRLSCAVSGFSLDDYSIGWFRQAPGKEREGIGLISGSDGFTIAADSVRGRTYYAKSMKGRFTISRDNVKNTVFLQMNNLKPEDTAVYTCAARRYGYYSDPDDKLIPEHEYDYWGRGTQVTVS

SEQ ID NO: 1758 - protein, 118 aa, synthetic construct
  REGION 1..118: note = Synthetic Construct
AEVQLVESGGGLVQPGGSLRLSCAASGSIFSANVMGWYRQTPGKQRELVASITNTGTAYYTDSVKGRFAISRDNGKNTVYLQMNSLKPEDAAVYVCNAFDLRDRLQWWGQGTQVTVSS

SEQ ID NO: 1759 - protein, 126 aa, synthetic construct
  REGION 1..126: note = Synthetic Construct
AQVQLVESGGGLVQAGGSLRLSCTASGGTFRSFTMAWFRQAPGKEREFVATLSWTGVGTYYADSVKGRFTISRDIAKNTVYLEMNSLIPEDTAVYYCAASPYTYSLLSRTGDYGYWGQGTQVTVSS

SEQ ID NO: 1760 - protein, 129 aa, synthetic construct
  REGION 1..129: note = Synthetic Construct
AQVQLVESGGGLVQAGDSLRLSCAASGRTISTYPMGWFRQAPGKEREFVATITRTGFGTYYSDSVKGRFTISRDNAKNTVFLQMNSLKAEDTAVYYCAAAKTTDWATRAPREMHEYAYWGQGTQVTVSS

SEQ ID NO: 1761 - protein, 127 aa, synthetic construct
  REGION 1..127: note = Synthetic Construct
AHVQLVESGGGLVQAGGSLRLSCAFSGGTFSSYGMGWFRQAPGKEREFVGGISRSGGNIYYLDSVKGRFTISRDNAKNTVYLQMNSLKPEDTAVYYCAADLGGLWHGVRTSRQYDYWGQGTQVTVSS

SEQ ID NO: 1762 - protein, 117 aa, synthetic construct
  REGION 1..117: note = Synthetic Construct
ADVQLVESGGGLVQAGGSLRLSCAVSGSTLGINAIGWYRQPPGKQRELVASISSLGTTLYAESVKGRFAISRDNAKNTGYLQMNSLKPDDTAVYYCNMRTPYMRGYWGQGTQVTVSS

SEQ ID NO: 1763 - protein, 127 aa, synthetic construct
  REGION 1..127: note = Synthetic Construct
ADVQLVESGGGLVQAGGSLRLTCAASGGTFSTSTMDMGWFRQAPGKEREFVAVDSWNDGRAYYADSVKGRFTISRDSAKTTLYLQMDSLKPEDTAVYYCARWRSGDSWSREEGYDYWGQGTQVTVSS

SEQ ID NO: 1764 - protein, 117 aa, synthetic construct
  REGION 1..117: note = Synthetic Construct
AHVQLVESGGGLVQAGGSLRLSCAVSGSTLGINAIGWYRQPPGKQRELVASISSLGTTLYAESVKGRFAISRDNAKNTGYLQMNSLKPDDTAVYYCNMRTPYMRVYWGQGTQVTVSS

SEQ ID NO: 1765 - protein, 128 aa, synthetic construct
  REGION 1..128: note = Synthetic Construct
ADVQLVESGGGLVQAGGSLRLSCAASGRTLMNYHMGWFRQAPGKEREFVAAITWNGDATNYADSKKGRFTISRDNAKNMVSLQMNSLKPEDTGVYYCAASRPAYGLPLQRQPSGYDYWGQGTQVTVSS

SEQ ID NO: 1766 - protein, 125 aa, synthetic construct
  REGION 1..125: note = Synthetic Construct
AQVQLVESGGGLVQTGGSLRLSCAASGGTGITYRMGWFRQAPGKEREFVSAISWNSAASYYTDSVKGRFTISRDNGKNIVYLQMNSLKPEDTAVYYCAAGIGHDYYTDEKGYHYWGHGTQVTVSS

SEQ ID NO: 1767 - protein, 128 aa, synthetic construct
  REGION 1..128: note = Synthetic Construct
ADVQLVESGGGLVQVGGSLRLSCAASGRTFSRYAAGWFRQAPGKEREFVAVITWNGDNTYYADSVKGRFTISRDNAKNTVYLQMNSLKPEDTAVYCCAIGGNHYSRSKYYIAAEYDYWGQGTQVTVSS

SEQ ID NO: 1768 - protein, 135 aa, synthetic construct
  REGION 1..135: note = Synthetic Construct
AHVQLVESGGGLVQPGGSLRLSCAASGFTLDHYAIGWFRQAPGKEREGVSCISSSDGRTYYGSTYYADSVKGRFTIYRDNAKNTVILQMNNLKPEDTAVYYCSTFSGRSQYYCSGEESLRDYDFWGQGTQVTVSS

SEQ ID NO: 1769 - protein, 130 aa, synthetic construct
  REGION 1..130: note = Synthetic Construct
ADVQLVESGGGLVQAGGSLRLSCAASADTISNWPMAWFRQAPGKEREFVAAISWSGSTTYYADSVKGRFTMSRDNAKATADLQMNSLKPEDTAVYYCAAAHGRVYGSRWFSSNGYDYPSWGQGTQVTVSS

SEQ ID NO: 1770 - protein, 134 aa, synthetic construct
  REGION 1..134: note = Synthetic Construct
AHVQLVESGGGLVQPGGSLRLSCAASGRTLSNYAMGWFRQAPGKEREFVAVIRQRTGTKSYTYYADSVKGRFTISGDGAKMTVSLQMNSLKPEDTAVYYCAIDLIEYYRSTYCYSTQPSSYDYWGQGTQVTVSS

SEQ ID NO: 1771 - protein, 124 aa, synthetic construct
  REGION 1..124: note = Synthetic Construct
ADVQLVESGGGLVQAGGSLRLSCAASGSIFSILNMGWYRQAPGKQRDLVARITPGGSTDYADSVKGRFTISRDNAKNTVNLQMNNLKPEDTAVYYCACRESPSTSVLVKNYDYWGQGTQVTVSS

SEQ ID NO: 1772 - protein, 127 aa, synthetic construct
  REGION 1..127: note = Synthetic Construct
AQVQLVESGGGLVQAGGSLRLSCAASGRTFSNWDMAWFRQAPGKEREFVAATAWSGGPTYYTHSVKGRFTISRDSAKNTVYLQMNSLQPEDTAVYHCAADLDPDWYLQDHPDTYDYWGQGTQVTVSS

SEQ ID NO: 1773 - protein, 128 aa, synthetic construct
  REGION 1..128: note = Synthetic Construct
AHVQLVESGGGLVHAGGSLRLSCAASGRTLMNYHMGWLRQAPGKEREFVAAITWNGDTTEYADSVKGRFTISRDNAKNMVSLQMNSLKPEDTGVYYCAASRPSSGSPLQRQPSGYDYWGQGTQVTVSS

SEQ ID NO: 1774 - protein, 126 aa, synthetic construct
  REGION 1..126: note = Synthetic Construct
ADVQLVESGGGLVQPGGSLRLSCAASGFTFSNSAMSWVRQAPGKGREWVAGIQREGTETKYIDSVKGRFTISRDNAKRTLYLQMNNVKPEDTGLYFCAKVLGRPYGSRWLDDVDYWGQGTQVTVSS

SEQ ID NO: 1775 - protein, 125 aa, synthetic construct
  REGION 1..125: note = Synthetic Construct
AQVQLVESGGGLVQAGGSLRLTCAASGGTFSTSTMDMGWFRQAPGKEREFVAVDSWNDGRAYYADSVKGRFTISRDSAKTTLYLQMNSLKPEDTAVYYCASTHGWTSRRSEYDYWGQGTQVTVSS

SEQ ID NO: 1776 - protein, 126 aa, synthetic construct
  REGION 1..126: note = Synthetic Construct
AEVQLVESGGGLVQAGGSLRLSCAASGRTFSTSTMDMGWFRQAPGKEREFVGADSWNDGRTYYADSVKGRFTISRDNAKNTLYLQMNNLKPEDTAVYYCAAETYSLYEKSDSWGYWGQGTQVTVSS

SEQ ID NO: 1777 - protein, 126 aa, synthetic construct
  REGION 1..126: note = Synthetic Construct
ADVQLVESGGGLVQAGGSLRLTCAASGRTFSTSTMDMGWFRQAPGKEREFVAAHSWNDGRTYYADSVKGRFTTSRDNAKNTLYLQMNSLKPEDTAVYYCAADTYSNYEKEYSWGYWGQGTQVTVSS

SEQ ID NO: 1778 - protein, 125 aa, synthetic construct
  REGION 1..125: note = Synthetic Construct
ADVQLVESGGGLAQSGDSLRLSCAASGRTFDINYMAWFRRAPGKEREFVCTTKWSGEDTYCDGSVQGRFTISRDNAKNSVYLQMDSLQPEDSAVYYCAARLFPGIATTSLDYSSWGQGTQVTVSS

SEQ ID NO: 1779 - protein, 127 aa, synthetic construct
  REGION 1..127: note = Synthetic Construct
AQVQLVESGGGLVQAGGSLRLSCAASGRTFSSYAMGWFRQAPGKEREFVAAINWSGDSTRYADSVKGRFTISRDIAKNTVYLQMNSLKPEDTAVYYCAGDRTFSLLTTPGTSGFRSWGQGTQVTVSS

SEQ ID NO: 1780 - protein, 122 aa, synthetic construct
  REGION 1..122: note = Synthetic Construct
ADVQLVESGGGLVQAGGSLKLSCALTGHTFSYYDMGWFRQAPGKEREVVATINWSGDDTNYANSVKGRFTISRDNAKNTLYLQMNSLKPEDTAVYYCVADPSGLVRGVFEHWGQGTQVTVSS

SEQ ID NO: 1781 - protein, 128 aa, synthetic construct
  REGION 1..128: note = Synthetic Construct
AQVQLVESGGGLVQAGGSLRLSCAASARTFSEHAMGWFRQAPGKEREFLAVIRLITNSTYYRDSVKGRFTISRDNAKNTVYLEMNNLKPEDTAIYYCAAYSAVRAFLSDYARYPPQSWGQGTQVTVSS

SEQ ID NO: 1782 - protein, 119 aa, synthetic construct
  REGION 1..119: note = Synthetic Construct
AHVQLVESGGGLVQAGASLRLSCAASGRTFSSARMGWFRQAPGKEREFVAAVFWGDGHPQYADSVKGRFTISTDTAKNTVYLQMSSLKPEDTAIYYCAARSASGRYDYWGQGTQVTVSS

SEQ ID NO: 1783 - protein, 126 aa, synthetic construct
  REGION 1..126: note = Synthetic Construct
AHVQLVESGGGLVQAGGSLRLTCAASGGTFSTSTMDMGWFRQAPGKEREFVAVDSWNDGRAYYADSVKGRFTISRDSAKTTLYLQMNSLKPEDTAVYYCAAEIYSNYEKDYSWGYWGQGTQVTVSS

SEQ ID NO: 1784 - protein, 127 aa, synthetic construct
  REGION 1..127: note = Synthetic Construct
AEVQLVESGGGLVQAGGSLRLTCAASGGTFSTSTMDMGWFRQAPGKEREFVAVDSWNDGRAYYADSVKGRFTISRDSAKTTLYLQMNSLTPEDTAVYYCAARVFPGIATSSLDYFSWGQGTQVTVSS

SEQ ID NO: 1785 - protein, 124 aa, synthetic construct
  REGION 1..124: note = Synthetic Construct
ADVQLVESGGGLAQSGDSLRLSCAASGRTFDINYMAWFRRAPGKEREFVCTTKWSGEDTYCDGSVQGRFTISRDNAKNSVYLQMDSLQPEDSAVYYCAARLFPGIATSSLDYSSWARGPRSPSS

SEQ ID NO: 1786 - protein, 126 aa, synthetic construct
  REGION 1..126: note = Synthetic Construct
AHVQLVESGGGLVQAGGSLRLSCAASGRTFSTYAMSWVRQAPGKRREWVAGIQREGTETHYTDSVKGRFTISRDNARNTVYLQMSNLKPEDTALYYCAKVLGRPYGSRWLEDIDAWGRGTQVTVSS

SEQ ID NO: 1787 - protein, 105 aa, synthetic construct
  REGION 1..105: note = Synthetic Construct
AEVQLVESGGGLVQTGDSLELSCAASGRTFDIKWSGDDAYCGDSVKGRFSISRDNAKNTVYLQMNSLKPEDTAVYYCAARLFPGIATFSLDYSSWGQGTQVTVSS

SEQ ID NO: 1788 - protein, 123 aa, synthetic construct
  REGION 1..123: note = Synthetic Construct
AHVQLVESGGGLLQTGDSLRLSCAASGRTLYTNAMGWFRQAPGKEREFVAAIGWNRYSILYADSVKGRFTISRDNAKNTVYLQMNSLKPEDTAIYYCAARSTSAVGSDQFNYWGQGTQVTVSS

SEQ ID NO: 1789 - protein, 125 aa, synthetic construct
  REGION 1..125: note = Synthetic Construct
ADVQLVESGGGLVQAGGSLRLSCAASGRTFSNSHMGWFRQAPGKEREFVAVISRSGGSTLYADSVKGRFTISRDNAKNTVYLQMNSLKPEDTAVYYCAASRTAGLTSSRSLYDYWGQGTQVTVSS

SEQ ID NO: 1790 - protein, 137 aa, synthetic construct
  REGION 1..137: note = Synthetic Construct
AEVQLVESGGGLVQAGGSLRLSCTASGPTVSFFSYSMAWFRQAPGKEREFVAGVTRTGGRRNYADSVQGRFTISKDNAKNTVSLQMNSLKSDDTAIYYCAADATRTYSSLSQRTDDYDYWGQGTQVTVQGTQVTVSS

SEQ ID NO: 1791 - protein, 125 aa, synthetic construct
  REGION 1..125: note = Synthetic Construct
AEVQLVESGGGLVQTGDSLELSCAASGRTFDISYMGWFRRAPGKERDFVCTIKWSGDDAYCGDSVKGRFSISRDNAKNTVYLQMNSLKPEDTAVYYCAARLFPGIATFSLDYASWGQGTQVTVSS

SEQ ID NO: 1792 - protein, 130 aa, synthetic construct
  REGION 1..130: note = Synthetic Construct
AHVQLVESGGGLVQAGGSLRLSCAVSGRTGSRYPMGWFRQAPGKEREFVATISWSDSRTYYADSVKGRFTISRDNAKNTVFLQMASLKPEDTAVYYCAAAHARVYGASWSSSNRYDYDSWGQGTQVTVSS

SEQ ID NO: 1793 - protein, 131 aa, synthetic construct
  REGION 1..131: note = Synthetic Construct
ADVQLVESGGGLVQAGGSLRLTCAASGGTFSTSTMDMGWFRQAPGKEREFVAVDSWNDGRAYYADSVKGRFTISRDNAKNTVLLQMNSLKPEDTAVYYCAADTAPKYALHASDQVRDYDYWGRGTQVTVSS

SEQ ID NO: 1794 - protein, 124 aa, synthetic construct
  REGION 1..124: note = Synthetic Construct
AQVQLVESGGGLVQPGGSLRLSCVASGFRLDDQNIAWFREFPGKDREAVSCMSGDDSGTYYGDSVKGRFTISRDKAKNTWYLQMNSLKAEDTAVYYCAIRRSCHLPFNPTHDYWGQGTQVTVSS

SEQ ID NO: 1795 - protein, 124 aa, synthetic construct
  REGION 1..124: note = Synthetic Construct
ADVQLVESGGGLVQAGGSLRLSCAASGSIFSILNMGWYRQAPGKQRDLVARITPGGSTDYADSVKGRFTISRDNAKNTMYLQMNNLEPGDTAVYYCGASRGYNIGKNPIGYTDWGQGTQVTVSS

SEQ ID NO: 1796 - protein, 117 aa, synthetic construct
  REGION 1..117: note = Synthetic Construct
AQVQLVESGGGLVQAGGSLRLSCAVSGSTLGINAIGWYRQPPGKQRELVASISSLGTTLYAESVKGRFAISRDNAKNTAYLQMNSLKPDDTAVYYCNMRTPYMRDFWGQGTQVTVSS

SEQ ID NO: 1797 - protein, 128 aa, synthetic construct
  REGION 1..128: note = Synthetic Construct
ADVQLVESGGGLVQAGGSLRLSCAASGRTLMNYHMGWLRQAPGKEREFVAAITWNGDTTEYADSVKGRFTISRDNAKNMVSLQMNSLKPEDTGVYYCAASRPSYGSPLQRQPPGYDYWGQGTQVTVSS

SEQ ID NO: 1798 - protein, 133 aa, synthetic construct
  REGION 1..133: note = Synthetic Construct
AQVQLVESGGGLVQPGGSLRLSCATSGIDLDFHAIGWFRQAPGKKREGVSCISWRDGRTYYADSVVKGRFTISRDNARNTVYLQMNNLKPEDTAVYYCAAGPKSSLTAAQAMGVMEGRHYVHWGQGTQVTVSS

SEQ ID NO: 1799 - protein, 127 aa, synthetic construct
  REGION 1..127: note = Synthetic Construct
AQVQLVESGGGLVQAGGSLRLSCAASTGTLSHYVAGWFRQAPGKEREFVATITWSGTNTYYADSVKGRFTISRDGAKNTVRLEMNALKSEDTAVYYCAAHWDNTQWYVYEVDGYAFWGQGTQVTVSS

SEQ ID NO: 1800 - protein, 118 aa, synthetic construct
  REGION 1..118: note = Synthetic Construct
AHVQLVESGGGLVQPGGSLRLSCAASGSIFSANVMGWYRQTPGKQRELVASITNTGTAYYTDSVKGRFAISRDNGKNTVYLQMNSLKPEDAAVYVCNAYDLRDRLQWGGQGTQVTVSS

SEQ ID NO: 1801 - protein, 127 aa, synthetic construct
  REGION 1..127: note = Synthetic Construct
ADVQLVESGGGSVQPGGSLRLSCAASGLILEHHTIGWYRQAPGKEREGVACIDGSDGSKYYAASVEGRFTISRDNAKNTVHLQMNSLKPEDTAIYYCATDVCTISGSYYYTGANFHWGQGTQVTVSS

SEQ ID NO: 1802 - protein, 128 aa, synthetic construct
  REGION 1..128: note = Synthetic Construct
AEVQLVESGGGLVHAGGSLRLSCAASGRTLMNYHMGWLRQAPGKEREFVAAITWNGDTTEYADSVKGRFTISRDNAKNMVSLQMNSLKPEDTGVYYCAASRPSYGSPLQRHPSGYDYWGQGTQVTVSS

SEQ ID NO: 1803 - protein, 128 aa, synthetic construct
  REGION 1..128: note = Synthetic Construct
AHVQLVESGGGLVQAGGSLRLSCAASGRTLMNYHMGWFRQAPGKEREFVAAITWNGDATNYSDSVKGRFTISRDNAKNMVSLQMNSLKPEDTGVYYCAASRPSCGLPLQRQPSGYDYWGQGTQVTVSS

SEQ ID NO: 1804 - protein, 126 aa, synthetic construct
  REGION 1..126: note = Synthetic Construct
ADVQLVESGGGLVQAGGSLRLSCAASGRTFSSSTMDMGWFRQAPGKEREFVAAHSWSGGRTYYADSVKGRFTISRDNAKNTLYLQMNRLKPEDTGVYYCAAETYTLYEKDTSWGYWGQGTQVTVSS

SEQ ID NO: 1805 - protein, 122 aa, synthetic construct
  REGION 1..122: note = Synthetic Construct
AQVQLVESGGGLVQAGGSLRLSCAASGRTFSSYTMGWFRQAPGKEREFVAAVSWNYYTYYADSVKGRFTISRDNAKNTVYLQMNSLKPEDTAGYYCAADSRSSYNLPNYAYWGQGTQVTVSS

SEQ ID NO: 1806 - protein, 128 aa, synthetic construct
  REGION 1..128: note = Synthetic Construct
AHVQLVESGGGLVHAGGSLRLSCAASGRTLMNYHMGWLRQAPGKEREFVAAITWNGDTTEYADSVKGRFTISRDNAKNMVSLQMNSLKPEDTGVYYCAASRPSCGSPLQRQPSGYDYWGQGTQVTVSS

SEQ ID NO: 1807 - protein, 132 aa, synthetic construct
  REGION 1..132: note = Synthetic Construct
AQVQLVESGGGLVHTGGSLRLSCAASGFTLDYYAIGWFRQAPGKEREGVSCISSSDGSAYYSDSVKGRFTISRDNAKNTVYLQMNSLKPEDTAVYYCATDLMRRMMYGKSWWCLNKNDFGSWGQGTQVTVSS

SEQ ID NO: 1808 - protein, 109 aa, synthetic construct
  REGION 1..109: note = Synthetic Construct
AHVQLVESGGGHTFDISYMAWFRRAPGKEREFVCTIKWTGDDAYCAGSVGGRFTISRDNAKNTVYLQMSGLNPEDTAVYYCAGRLFPGIATSSLDYSSWGQGTQVTVSS

SEQ ID NO: 1809 - protein, 127 aa, synthetic construct
  REGION 1..127: note = Synthetic Construct
ADVQLVESGGGLVQAGGSLRLSCAASGRTFSRYGMGWFRQAPRKEREFVAAISWSGRSTDYEDSVKGRFTITRAGANAYLQMNTLKPEDTGVYYCALDITDYSRDYVHNFDFNYDYWGQGTQVTVSS

SEQ ID NO: 1810 - protein, 131 aa, synthetic construct
  REGION 1..131: note = Synthetic Construct
AQVQLVESGGGLVQAGGSLRLSCAASGRPLSNYAMAWFRQAPRKEREFLTAISASAERTYYTDSVKGRFTISRDDAKNTVYLQMNDLKPEDTAVYICAAVFTRNSWYIPDHGTRPDEYAGRGQGTQVTVSS

SEQ ID NO: 1811 - protein, 117 aa, synthetic construct
  REGION 1..117: note = Synthetic Construct
AQVQLVESGGGLVQAGGSLRLSCAVSGSTLGINAIGWYRQPPGKQRELVASISSLGTTLYAESVKGRFAISRDNAKNTGYLQMNSLKPDDTAVYYCNMRTPYMRDSWGQGTQVTVSS

SEQ ID NO: 1812 - protein, 128 aa, synthetic construct
  REGION 1..128: note = Synthetic Construct
ADVQLVESGGGLVQAGGSLRLSCTASGRTFSRYAAGWFRQAPGKEREFVAVIEWNGGSRYYADSVKGRFTISRDNAKNTVYLQMNRLKPEDTAVYICAVGGNHYSPSKYFTADEYDHWGQGTQVTVSS

SEQ ID NO: 1813 - protein, 117 aa, synthetic construct
  REGION 1..117: note = Synthetic Construct
AHVQLVESGGGLVQAGGSLRLSCAVSGSTLGINAIGWYRQPPGKQRELVASISSLGTTLYAESVKGRFAISRDNAKNTGYLQMNSLKPDDTAVYYCNMRTPYMRDNWGQGTQVTVSS

SEQ ID NO: 1814 - protein, 130 aa, synthetic construct
  REGION 1..130: note = Synthetic Construct
AQVQLVESGGGLVQAGGSLRLSCAVSGRTGSRYPMGWFRQAPGKEREFVATISWSDSRTYYADSVKGRFTISRDNAKNTVFLQMASLKPEDTAVYYCAAAHARVYGANWSSSNRYDYSSWGQGTQVTVSS

SEQ ID NO: 1815 - protein, 126 aa, synthetic construct
  REGION 1..126: note = Synthetic Construct
ADVQLVESGGGSVQPGSSLTLSCAASGFTFRTYAMAWVRQAPGKGREWVAGIQREGTETNYADSVKGRFTISRDNGKNMLYLQMNSLKPEDTALYYCAKVLGRPYGSHWLSDIDARGQGTQVTVSS

SEQ ID NO: 1816 - protein, 125 aa, synthetic construct
  REGION 1..125: note = Synthetic Construct
AEVQLVESGGGLAQSGDSLRLSCAASGRTFDINYMAWFRRAPGKEREFVCTTKWRGEDTYCDGSVQGRFTISRDNIKNTVYLQMNSLKPEDTAVYYCAARRPNLLITDPQAFDSWGQGTQVTVSS

SEQ ID NO: 1817 - protein, 124 aa, synthetic construct
  REGION 1..124: note = Synthetic Construct
AQVQLVESGGGLVQPGGSLRLSCAASGMIFSISTAGWFRQTPGNVHERVAVITSGGSTNYDDSVKDRFTISRDNAKNTLYLQMNSLKPEDTAVYYCYVVTGGTDYWGQGTQVTVFQGTQVTVSS

SEQ ID NO: 1818 - protein, 127 aa, synthetic construct
  REGION 1..127: note = Synthetic Construct
AHVQLVESGGGLVHAGGSLRLSCAASGRTLMNYHMGWLRQAPGKEREFVAAITWNGDATEYADSVKGRFTISRDNAKNMVSLQMNSLKPEDTGVYYCAASRPSYGLPLQRHPSGYDYWGQGPRSPSS

SEQ ID NO: 1819 - protein, 120 aa, synthetic construct
  REGION 1..120: note = Synthetic Construct
AEVQLVESGGGLVQAGGSLGLSCAASGSIFRLTAMGWYRQAPGKQRDLVTTITSAGIPHYADSVKGRFTISRDNAKNTVYLQMNGLKPEDTAVYYCYANTLNSQLLPRAYWGQGPRSPSS

SEQ ID NO: 1820 - protein, 130 aa, synthetic construct
  REGION 1..130: note = Synthetic Construct
ADVQLVESGGGLVQAGGSLRLSCAVSGRTGSRYPMGWFRQAPGKEREFVATISWSDSRTYYADSVKGRFTISRDNAKNTVFLQMASLKPEDTAVYYCAAAHARVYGTNWSSSNRYDYDSWGQGTQVTVSS

SEQ ID NO: 1821 - protein, 120 aa, synthetic construct
  REGION 1..120: note = Synthetic Construct
AEVQLVESGGGLVQAGGSLRLSCAASGSIFSSNAMSWYRQAPGKQRELVAGITSGGNANYEDSVKGRFTISRDKDTVYLEMSSLKPADTAVYYCHAVGQVGSAYAPRAYWGQGTQVTVSS

SEQ ID NO: 1822 - protein, 124 aa, synthetic construct
  REGION 1..124: note = Synthetic Construct
AHVQLVESGGGLVQAGGSLRLTCAASGGTFSTSTMDMGWFRQAPGKEREFVAVDSWNDGRAYYADSVKGRFTISRDSAKTTLYLQMNSLKPEDTAVYYCARGSVSQYSRQYAYWGQGTQVTVSS

SEQ ID NO: 1823 - protein, 116 aa, synthetic construct
  REGION 1..116: note = Synthetic Construct
ADVQLVESGGGLVAAGGSLRLSCTASGIFFNIFTMAWYRRAPGKQREFVATMTYGGSTSSAGSVKGRFTISRDNAKNMVYLQMNSLKPEDTAVYYCNAIDDLSDYWGQGTQVTVSS

SEQ ID NO: 1824 - protein, 126 aa, synthetic construct
  REGION 1..126: note = Synthetic Construct
AQVQLVESGGGLVQAGGSLRLTCAASGGTFSTSTMDMGWFRQAPGKEREFVAVDSWNDGRAYYADSVKGRFTISRDSAKTTLYLQMNSLKPEDTAVYYCAAETYSNYEKDYCWGYWGQGTQVTVSS

SEQ ID NO: 1825 - protein, 125 aa, synthetic construct
  REGION 1..125: note = Synthetic Construct
AQVQLVESGGGLVQAGGSLRLSCAASGRTFSSYAMGWFRQAPGKEHEFVAAIRWSGASTYYAKSVKGRFTISRDNAKNTVYLQMNSLKPEDTAVYYCAADTGGVVTTAWNEYEYWGQGTQVTVSS

SEQ ID NO: 1826 - protein, 132 aa, synthetic construct
  REGION 1..132: note = Synthetic Construct
AQVQLVESGGGLVQPGGSLRLSCAASGIDLDFHTIGWFRQAPGKEREGVSCISWRDERTYYANSVAGRFTISRDNARSTVYLQMNSLKPEDTAVYYCATAPKSSLTAAQAMGVMEGRDYAHWGQGTQVTVSS

SEQ ID NO: 1827 - protein, 125 aa, synthetic construct
  REGION 1..125: note = Synthetic Construct
AHVQLVESGGGLAQSGDSLRLSCAASGRTFDINYMAWFRRAPGKEREFVCTTKWSGEDTYCDGSVQGRFTISRDNAKNSVYLQMDSLQPEDSAVYYCAARLFPGIATSSLDYDSWGQGTQVTVSS

SEQ ID NO: 1828 - protein, 116 aa, synthetic construct
  REGION 1..116: note = Synthetic Construct
AHVQLVESGGGLVQAGGFLRLSCAASGSTSSINSIGWFRQAPGKQREWVATITTGENTNYAGSVKGRFTISRANGKNAVYLQMNSLKPEDTAVYYCYAVDDAMDYWGRGTQVTVSS

SEQ ID NO: 1829 - protein, 122 aa, synthetic construct
  REGION 1..122: note = Synthetic Construct
AQVQLVESGGGLVQAGGSLKLSCALTGHTFSYYDMGWFRQAPGKEREVVATINWSGELTDYANSVKGRFTISRDNAKNTLYLQMNSLKPEDTAVYYCVADPSGLTRGVFEHWGQGTQVTVSS

SEQ ID NO: 1830 - protein, 128 aa, synthetic construct
  REGION 1..128: note = Synthetic Construct
AHVQLVESGGGLVQAGGSLRLSCAASGGTFSTYTMGWFRQAPGKEREFVAGVARSAGTTYYTDSVKGRFTISRDNAKNEVYLQMNSLKPEDTAVYYCAARSVTQYTIVLSNPIHYDYWGQGTQVTVSS

SEQ ID NO: 1831 - protein, 130 aa, synthetic construct
  REGION 1..130: note = Synthetic Construct
ADVQLVESGGGLVQAGGSLRLSCAVSGRTGSRYPMGWFRQAPGKEREFVATISWSDSRTYYADSVKGRFTISRDNAKNTVFLQMASLKPEDTAVYYCAAEHARVYGANWSSSNRYDYDSWGQGTQVTVSS

SEQ ID NO: 1832 - protein, 126 aa, synthetic construct
  REGION 1..126: note = Synthetic Construct
AQVQLVESGGGLVQAGGSLRLSCAASGFTFSTYAMTWVRQAPGKRREWVAGIQREGTETHYADSVKGRFTVSRDNVKRTLYLQMNNLNPEDTGLYFCAKVIGRPYGRHWLDDIDVWGKGTQVTVSS

SEQ ID NO: 1833 - protein, 125 aa, synthetic construct
  REGION 1..125: note = Synthetic Construct
AQVQLVESGGGLVQAGGSLRLSCAASGGTFSWYTMGWFRQAPGKEREFVAAISWTGGSTYYADSVKGRFTISRDNAKNMVYLQMISLKPEDTALYYCAASDGVVDGTSANDYRYWGQGTQVTVSS

SEQ ID NO: 1834 - protein, 126 aa, synthetic construct
  REGION 1..126: note = Synthetic Construct
AQVQLVESGGGLVQAGGSLRLSCAASGGTLRSYNMGWFRQGPGKEREFVAAISWTGLGTYYGDSVKGRFTISRDVIKNTLYLQMDSLKPEDTAIYYCAADSSTSRLHSAGSDYRYWGQGTQVTVSS

SEQ ID NO: 1835 - protein, 126 aa, synthetic construct
  REGION 1..126: note = Synthetic Construct
ADVQLVESGGGLVQAGGSLRLTCAASGGTFSTSTMDMGWFRQAPGKEREFVAVDSWNDGRAYYADSVKGRFTISRDSAKTTLYLQMNSLKPEDTAVYYCAAETYSTYEKDYSWGYWGQGTQVTVSS

SEQ ID NO: 1836 - protein, 126 aa, synthetic construct
  REGION 1..126: note = Synthetic Construct
AHVQLVESGGGSVQAGESLRLSCAASGRIFSVYAMGWFRQAPGKEREFVAAVTWSGGSTYYADSVKGRFTVSRDNAKNTVYLQMNSLKPEDTGVYYCAAAPTWYNDRARDELFHYWGQGTQVTVSS

SEQ ID NO: 1837 - protein, 123 aa, synthetic construct
  REGION 1..123: note = Synthetic Construct
AEVQLVESGGGLVQAGGSLRLSCAASGHTFSTNTMGWFRQAPGKEREFVGCITWSDYTLYTDSVKGRFTISRDNSKSTVYLQMNSLKPEDTAVYYCAAVPGAAVVTTASLYHTWGQGPRSPSS

SEQ ID NO: 1838 - protein, 126 aa, synthetic construct
  REGION 1..126: note = Synthetic Construct
ADVQLVESGGGLVQAGDSLRLSCAASGSAFSGGTTFSRTAIGWYRQAPGNQRELVASISSGGVTNYADSVKGRFTISRDNAKNTHHLQMNSLIPEDTAVYYCKLTTRIFNLPRDYWGQGTQVTVSS

SEQ ID NO: 1839 - protein, 123 aa, synthetic construct
  REGION 1..123: note = Synthetic Construct
AQVQLVESGGGLVQAGGSLRLSCVASGTGFEPNAMAWYRQAPGKQRELVAGITSGGNANYADSVKGRFTISRDNAKNTLYLQMNNLKPEDTAVYYCAADTYSLYEKDSSWGYWGQGTQVTVSS

SEQ ID NO: 1840 - protein, 126 aa, synthetic construct
  REGION 1..126: note = Synthetic Construct
AEVQLVESGGGLVQAGGSLRLSCAASGRTLRSYNMGWFRQAPGKEREFVAASSWTGIGTYYADSVKGRFTISRDNLKNTLFLQMESLKPEDTAVYYCAADSTLDRLHSAGTDYRYWGQGTQVTVSS

SEQ ID NO: 1841 - protein, 123 aa, synthetic construct
  REGION 1..123: note = Synthetic Construct
AHVQLVESGGGLVQPGGSLRLSCVASGTGFEPNAMAWYRQAPGKQRELVAGITSGGNANYADSVKGRFTISRDNVKNTVYLQMNSLKPEDTAVYYCNAVGPRANPPGTPTNYWGQGTQVTVSS

SEQ ID NO: 1842 - protein, 127 aa, synthetic construct
  REGION 1..127: note = Synthetic Construct
AQVQLVESGGGLVQAGDSLRLSCTASGLTFSAYGMGWFRQAPGKEREFVAGIARSGSEFYGDSVKGRFTISRDNAKNTVYLQVNSLRPEDTALYYCAADRAILYHAISQRTQNYQYWGPGTQVTVSS

SEQ ID NO: 1843 - protein, 122 aa, synthetic construct
  REGION 1..122: note = Synthetic Construct
AHVQLVESGGGLVQAGGSLRLSCAASKNIFSFNAIAWYRQAPGKKRELVAEMPSGGRIYYPHSVEGRFTVSIDNAKNMGYLQMNSLKPEDTAVYYCNADLRPSPSSPEYNLWGQGTQVTVSS

SEQ ID NO: 1844 - protein, 121 aa, synthetic construct
  REGION 1..121: note = Synthetic Construct
AQVQLVESGGGLVQPGESLRLLCVASGSIDSINAMGWFRQAPGKQRELVASISNMHTTLYAESVKGRFTISRDNAKNTADLQMNSLKPEDTAIYFCNLRQGCSHNGCDEYWGQGTQVTVSS

SEQ ID NO: 1845 - protein, 122 aa, synthetic construct
  REGION 1..122: note = Synthetic Construct
AHVQLVESGGGLVQAGGSLRLSCAASGFTFRNYAMNWVRQAPGKGREWVSGINSDGTDTYYLDSVKGRFTISRDNGKNIVYLQMNDLKPADTAVYYCAKSHLSSVSLNTDYQGQGTQVTVSS

SEQ ID NO: 1846 - protein, 123 aa, synthetic construct
  REGION 1..123: note = Synthetic Construct
AQVQLVESGGGLVQAGGSLRLSCVVSGFPFSEYAMSWVRQTPEKGREWVSGIYTDGSETLYENSVKGRFTISRDNTKNTLYLQMNNLKPEDTARYYCKLGDPYGVGLRDYEYWGHGTQVTVSS

SEQ ID NO: 1847 - protein, 125 aa, synthetic construct
  REGION 1..125: note = Synthetic Construct
AHVQLVESGGGLVQAGGSLRLSCAASGGTFSSYAMGWFRQVPGKEREFVAVISKSGIITGDADSVKGRFTISRDNAKNTVYLQMNSLKPEDTAVYYCAADRGPELTKIAPDYDYWGQGTQVTVSS

SEQ ID NO: 1848 - protein, 123 aa, synthetic construct
  REGION 1..123: note = Synthetic Construct
ADVQLVESGGGLVQAGGSLRLSCAASGSIFSINAMGWYRQAPGKQRELVAGVTSGGNANYADSVQGRFTISRDNVKNTVYLQMNSLKPEDTAVYYCNAVGPGINPRGSPTNYWGQGTQVTVSS

SEQ ID NO: 1849 - protein, 118 aa, synthetic construct
  REGION 1..118: note = Synthetic Construct
AHVQLVESGGGLVQAGGSLRLSCAASGSTFSIIGWYRQAPGKQRELVAGITSGGNADYADSVKGRFTISRDKNTVDLEMSSLKPADTAVYYCHAVGQEAGAYGPRAYWGQGTQVTVSS

SEQ ID NO: 1850 - protein, 117 aa, synthetic construct
  REGION 1..117: note = Synthetic Construct
AHVQLVESGGGLVQAGGSLRLSCAASGSTFSGNAIGWYRQAPGKQRELLASIGNTGRTDYADSVKGRFTISRDNAKTTVHLQMNSLKPEDTAIYYCNYRDAYLSEYWGQGTQVTVSS

SEQ ID NO: 1851 - protein, 125 aa, synthetic construct
  REGION 1..125: note = Synthetic Construct
AHVQLVESGGGLVQAGGSLRLSCAASGRTFSNYAMTWFRQAPGKEREFVASISSSVGSTSYADSVKGRFTISRDRAKNTGYLQMNTLKPEDTAVYYCAVSDRYDRDLRAPRYDYWGQGTQVTVSS

SEQ ID NO: 1852 - protein, 131 aa, synthetic construct
  REGION 1..131: note = Synthetic Construct
ADVQLVESGGGLVQAGGSLRLSCVASGFTFSAYAMSWVRQVPGKGREWISGIYNDGSNIYYADSVKGRFSISRDNAKNTLYLQMNNLKPDDTAVYYCTKEHARGFGGRGNPNPSDLVYDAWGQGTQVTVSS

SEQ ID NO: 1853 - protein, 115 aa, synthetic construct
  REGION 1..115: note = Synthetic Construct
ADVQLVESGGGLVQAGGSLRLSCAASGRTFSSYAMGWFRQAPGKQREYLATITAGPSTNYADAVKGRFTISRDDAKNTAYLQMDSLRPGDTALYICQVTGVGVYEGQGTQVTVSS

SEQ ID NO: 1854 - protein, 123 aa, synthetic construct
  REGION 1..123: note = Synthetic Construct
AHVQLVESGGGLVQAGGSLRLSCAASGSIINFNSMGWYRQAPGQQRELVASITHEGNPNYSDYVKGRFTISQEKGKRTVHLQMNNLGPEDTAVYYCNARLLTPPPILDLKNLWGQGTQVTVSS

SEQ ID NO: 1855 - protein, 123 aa, synthetic construct
  REGION 1..123: note = Synthetic Construct
AHVQLVESGGGLVQAGDSLRLSCTASGDTLYTNAMGWFRQAPGKEREFVAAIGWNAYSVLYADSVKGRFTISRDNAKNTIYLQMNSLKPEDTAIYYCAARSTSAVGYNQYNTWGQGTQVTVSS

SEQ ID NO: 1856 - protein, 125 aa, synthetic construct
  REGION 1..125: note = Synthetic Construct
AHVQLVESGGGLVQAGGSLRLSCAASGRTFSTHAMAWFRQAPGKERDFVAAISWSGTGTYYTDSVKGRFTISRDNAKKMVYLQMNSLKPEDTAVYYCGISRAIVSGIDANSYDYWGQGTQVTVSS

SEQ ID NO: 1857 - protein, 127 aa, synthetic construct
  REGION 1..127: note = Synthetic Construct
ADVQLVESGGGLVQAGGSLRLSCVVSGDTFSSYAMGWFRQAPGKEREFVAAISQGGSTDYADSVKGRLTISRDNAKNTVYLQMNSLKPEDTAVYYCAADLAPLRFAIPRTHGQYDYWGQGTQVTVSS

SEQ ID NO: 1858 - protein, 124 aa, synthetic construct
  REGION 1..124: note = Synthetic Construct
AHVQLVESGGGLVQAGDSLRLSCAASGRTFRLYAMGWFRQAPGKQRELVATITATSATDYENSVKGRFTISRDNAKNTVYLQMNSLKPEDTAVYYCNTCKFRLSLICHPGQDYWGQGTQVTVSS

SEQ ID NO: 1859 - protein, 124 aa, synthetic construct
  REGION 1..124: note = Synthetic Construct
AHVQLVESGGGLVQAGGSLRLSCAASGSTFSGNAIGWYRQAPGKQRELVATINAPGSTDYAESVKGRFTISRDNAKNTVFLQMNSLKPEDTAIYYCNVCKFRLSVICHPGQDYWGQGTQVTVSS

SEQ ID NO: 1860 - protein, 126 aa, synthetic construct
  REGION 1..126: note = Synthetic Construct
AEVQLVESGGGLVQAGGSLRLSCAASGRTFSTSTMGWFRQPPGKERQFVAGISWRGGDTRYTDNVKGRFTISRDNIKNMVYLQMNSLKPEDTAVYYCAAKERTLVVYTVKEMYEFWGQGTQVTVSS

SEQ ID NO: 1861 - protein, 128 aa, synthetic construct
  REGION 1..128: note = Synthetic Construct
AQVQLVESGGGLVQTGGSLRLSCAVSGYTFSIFPAAWFRQAPGKEREFVAGIRWNGGTRHYTEYAEFVKGRFTISRDNAKNMVYLEMINLKPEDTALYYCAVSDGVIDGTSANGYPYWGQGTQVTVSS

SEQ ID NO: 1862 - protein, 125 aa, synthetic construct
  REGION 1..125: note = Synthetic Construct
ADVQLVESGGGLVQAGGSLRLSCAASGRTFSNSGMAWFRQPPGKEREFVAVISASGGSRYYSDSVKGRFTVSRDNTKNTMYLQMTTLKPEDTAVYFCAASRILVPPSTPGDYDSWGQGTQVTVSS

SEQ ID NO: 1863 - protein, 130 aa, synthetic construct
  REGION 1..130: note = Synthetic Construct
AHVQLVESGGGLVQAGGSLRLSCAASGRAINNYQMGWFRRPPGKGREFVAAITRTGDRTHYADSVKGRFTISRDNAENTGYLQMNSLKPEDTAVYYCAVYGGYRWYGDSSPPTSRLYDYWGQGTQVTVSS

SEQ ID NO: 1864 - protein, 129 aa, synthetic construct
  REGION 1..129: note = Synthetic Construct
ADVQLVESGGGLVQAGGSLRLSCAASGGTFSTYAMGWFRQAPGKEREFVSAIAWRGGVTYYGDAVKGRFTISRDNAKNTVYLEMNSPTPEDTAVYYCAADADPPASYATSEYSRHYDYWGQGTQVTVSS

SEQ ID NO: 1865 - protein, 125 aa, synthetic construct
  REGION 1..125: note = Synthetic Construct
AEVQLVESGGGLVQAGGSLRLSCSASGRTFSTSHMGWFRQAPGKEREFVAVISRSGGSTLDADSVKGRFTISRDNAKNTVYLQMNNLKPEDTAVYYCAGSRTAGLTSNRHLYDSWGQGTQVTVSS

SEQ ID NO: 1866 - protein, 126 aa, synthetic construct
  REGION 1..126: note = Synthetic Construct
AQVQLVESGGGLVQAGGSLRLSCAASGRAFGTYFIGWFRQAPGKEREFLASISGTGFGTYYADSVKGRFTISRDNAKNTVYLQMNSLKPEDTGVYYCAAAPTWYSDRARDELFHYWGQGTQVTVSS

SEQ ID NO: 1867 - protein, 128 aa, synthetic construct
  REGION 1..128: note = Synthetic Construct
AQVQLVESGGGLVQAGGSLRLSCAASGRTFSRYSMAWFRQAPGKEREFVAAISRDGGRTPYVASAKGRFTISRDDAKGTMYLQMNSLKPEDTAIYYCAADSRVSVELFATSFGAFEYWGQGTQVTVSS

SEQ ID NO: 1868 - protein, 126 aa, synthetic construct
  REGION 1..126: note = Synthetic Construct
AHVQLVESGGGLVQAGGSLRLSCAASGRTFSSDTMDMGWFRQAPGKERAFVAAHAWNDGRTYYADSVKGRFTISRDNAKNTLYLQMNNLKPEDTAVYYCAAETYSLYEKDSSWGYWGQGTQVTVSS

SEQ ID NO: 1869 - protein, 128 aa, synthetic construct
  REGION 1..128: note = Synthetic Construct
AEVQLVESGGGLVQTGGSLRLSCAVSGYTFSTFPSGWFRQAPGKEREFVAGIRWNGRSRDYTEYADFVKGRFTISRDNAKNMVYLQMISLKPEDTALYYCAVSDGVIDGTSANSYRYWGQGTQVTVSS

SEQ ID NO: 1870 - protein, 125 aa, synthetic construct
  REGION 1..125: note = Synthetic Construct
AHVQLVESGGGLVQPGGSLRLSCAASGRSFNNDAMAWFRQRPRKEREFVAGIKWDEGDTEYADSVKGRFTISRDNVKNTIFLQMNKLKPEDTAVYFCAQTAGGIIGTSTTWYDYWGQGTQVTVSS

SEQ ID NO: 1871 - protein, 125 aa, synthetic construct
  REGION 1..125: note = Synthetic Construct
AQVQLVESGGGLVQAGGSLRLSCTASGRTFNNYHMGWFRQAPGKEREFVAVVSRSGGSTLDADSVKGRFTVSRDNAKNTVYLQMNSLKPEDTAVYYCAASRTAGLTSNRSLYVYWGQGTQVTVSS

SEQ ID NO: 1872 - protein, 123 aa, synthetic construct
  REGION 1..123: note = Synthetic Construct
AEVQLVESGGRSVQPGASLRLSCAASGQRFSDWSMAWFRQAAGKEREFVAGIDGKDTIEYADSVKDRFFISRDNGRNMVYLQLNNVKPGDTAVYYCTTDRSTVFRNPMLYDYWGQGTQVTVSS

SEQ ID NO: 1873 - protein, 126 aa, synthetic construct
  REGION 1..126: note = Synthetic Construct
AHVQLVESGGGLVQAGGSLRLSCAASGITRKNYVIGWYRQVPGKEREGVSCISSTDDSTVYADSVKGRFTISRDNAKNTVYLQMNGLKPEDTAVYYCWTDRSCNYYSDPGHLYDWWGQGTQVTVSS

SEQ ID NO: 1874 - protein, 117 aa, synthetic construct
  REGION 1..117: note = Synthetic Construct
ADVQLVESGGGLVQPGGSLRLSCEASGFTFSTYAMTWVRQAPGKGPEWVSAINSGGDSTTYAASVKGRFTMSRDNAKDTLYLQMNSLKPEDTAVYSCVKGMVKYDFWGQGTQVTVSS

SEQ ID NO: 1875 - protein, 126 aa, synthetic construct
  REGION 1..126: note = Synthetic Construct
AQVQLVESGGGLVQAGGSLRLTCAASGGTFSTSTMDMGWFRQAPGKEREFVAVHAWNDGRAYYADSVKGRFTISRDSAKTTLYLQMNSLKPEDTAVYYCAAETYSIYEKDSSWGYWGQGTQVTVSS

SEQ ID NO: 1876 - protein, 124 aa, synthetic construct
  REGION 1..124: note = Synthetic Construct
ADVQLVESGGGFVHAGGSLRLSCAASGSTFSGNAIGWYRQAPGKQRELVATINAPGSTDYAESVKGRFTISRDNAKNTVFLQMNSLKPEDTAVYYCNTCKFRLSVLCQPGQDYWGQGTQVTVSS

SEQ ID NO: 1877 - protein, 121 aa, synthetic construct
  REGION 1..121: note = Synthetic Construct
ADVQLVESGGGLVQAGGSLRLSCVPSSSIFSANAMGWYRQAPGEQRELVASITSGGNADYADSVKGRFTISRDNADTVILQMNSLKPEDTAVYYCKGTAYSPIYKSVRDYWGQGTQVTVSS

SEQ ID NO: 1878 - protein, 124 aa, synthetic construct
  REGION 1..124: note = Synthetic Construct
AQVQLVESGGGLVQAGGSLRLSCAASGSTLSGNAIGWYRQTPGNERELVGTITATSATDYANSVKGRFTISRDNAKNTVYLQMNSLKPEDTAVYYCNTCKFRLAVLCHPGQDYWGQGTQVTVSS

SEQ ID NO: 1879 - protein, 125 aa, synthetic construct
  REGION 1..125: note = Synthetic Construct
AHVQLVESGGDFVQPGGSLRLSCVASGISVSDYPIGWFRQAPGKVREGVSCISSHGESTEYRDSVKARFTISKDRTKNTVFLQMNSLKPGDTAVYYCATLLRCDDSWPLSRFHSWGQGTQVTVSS

SEQ ID NO: 1880 - protein, 125 aa, synthetic construct
  REGION 1..125: note = Synthetic Construct
ADVQLVESGGGLVQAGGSLRLSCAAAGRSFGTYFIGWFRQAPGKERDFVAAISGTGFGTYYADSVKGRFTISRDNARNTVFLQMNSLKPEDTGVYYCAAAPRWYSDRAETSYSTIGARGPRSPSS

SEQ ID NO: 1881 - protein, 122 aa, synthetic construct
  REGION 1..122: note = Synthetic Construct
AQVQLVESGGGLVQAGGSLRLSCAASSRFSTSAMGWFRQAPGKEREFVAAISWSNTNTHYADTVKGRFTISTDAPKDTVYLQMNSLKPEDTAVYYCAQGGWGITQPIIVDYWGKGTQVTVSS

SEQ ID NO: 1882 - protein, 126 aa, synthetic construct
  REGION 1..126: note = Synthetic Construct
AEVQLVESGGGLVQAGGSLRLSCAAAGRSFGTYFIGWFRQAPGKERDFVAAISGTGFGTYYADSVKGRFTISRDNARNTVFLQMNSLKPEDTGVYYCAAAPRWYSDRARDELFHYWGQGTQVTVSS

SEQ ID NO: 1883 - protein, 127 aa, synthetic construct
  REGION 1..127: note = Synthetic Construct
AHVQLVESGGGLVQAGDSLRLSCTASGRTFSTYGMGWFRQAPGKEREFVAGIARSGSEFYGDSVKGRFTISRDNAKNTVYLQMASLKAEDTGVYYCAADPTVLYHAISERTQNYRYWGPGTQVTVSS

SEQ ID NO: 1884 - protein, 131 aa, synthetic construct
  REGION 1..131: note = Synthetic Construct
AHVQLVESGGGLVQAGGSLRLSCAASGFDFAGYAMSWVRQVPGKGREWVAGIYPDGRNIYYADSVKGRFSISRDDAANTLYLQMNNLKPDDTALYRCTKEHARGFGGLGNPNPSDLVYSAWGQGTQVTVSS

SEQ ID NO: 1885 - protein, 125 aa, synthetic construct
  REGION 1..125: note = Synthetic Construct
AQVQLVESGGGFVQPGHSLRLSCTTSGFRLDHYAIGWFRQAPGKEREGISWIFYNDATTYYTDSVKGRFTASRDNYKNTVYLQMDSLKPEDTAVYYCARWRSGSSWSREEGYDYWGQGTQVTVSS

SEQ ID NO: 1886 - protein, 131 aa, synthetic construct
  REGION 1..131: note = Synthetic Construct
AQVQLVESGGGLVQPGGSLRLSCVASGFAFSSYAMSWVRQVPGKGREWVAGIYPGGGNIYVADSVKGRFSISRDDARNTLYLQMNNLKPDDTALYRCTKEHARGFGGESNPNPSDLVYSAWGQGTQVTVSS

SEQ ID NO: 1887 - protein, 128 aa, synthetic construct
  REGION 1..128: note = Synthetic Construct
AEVQLVESGGGLVQPGGSLRLSCTASTDALSSYGMSWFRQAPGKEREFVAGSSWSGRGIYYVTSVKGRFTISRDNRKNTVTLQMNSLKPEDTAVYYCAAGVLRNDYSDYVDKNEYNYWGQGTQVTVSS

SEQ ID NO: 1888 - protein, 128 aa, synthetic construct
  REGION 1..128: note = Synthetic Construct
AHVQLVESGGGLVQAGGSLRLSCAASGRTFSRYAAAWFRQAPGKERSFVAVIEWDGDTAYYSDSVKGRFTISRDNAKNTLYLQMNRLKPEDTAVYICAVGGNHYDSSKYYIADEYDYWGQGTQVTVSS

SEQ ID NO: 1889 - protein, 122 aa, synthetic construct
  REGION 1..122: note = Synthetic Construct
AQVQLVESGGGLVQAGGSLRLSCAASGSIINFNSMGWYRQAPGQQRELVASITHEGNPNYSDYVKGRFTISQEKGKRTVHLQMNNLGPEDTAVYYCNARLLTPPPILDLKNFWARGPRSPSS

SEQ ID NO: 1890 - protein, 127 aa, synthetic construct
  REGION 1..127: note = Synthetic Construct
AEVQLVESGGGLVQAGGSLRLSCVASGGTFSSYAMGWFRQAPGKERELVAAISRGASTDYADSVKGRFTISRDNAKNTVYLQMNSLKPEDTAVYYCAADQSPLRFALPRSQGQFDYWGQGTQVTVSS

SEQ ID NO: 1891 - protein, 128 aa, synthetic construct
  REGION 1..128: note = Synthetic Construct
ADVQLVESGGGSVQAGGSLRLSCAASGGTLNTYAMGWFRQAPDKERELVAAISRSGSHTYYADSLKGRFTISRDNAKNTVNIEMNSLKFEDTAVYYCAASRTVLDDGVKLHGNHYDYWGQGTQVTVSS

SEQ ID NO: 1892 - protein, 125 aa, synthetic construct
  REGION 1..125: note = Synthetic Construct
AHVQLVESGGGLVQTGGSLRLSCVASGRTFSTHAMAWFRQAPGKERDFVAAISWSGTGTYYADSVKGRFTISRDNSKNTVYLQMNSLKPEDTAVYYCGISRAIVSGIDANSYEYWGQGTQVTVSS

SEQ ID NO: 1893 - protein, 120 aa, synthetic construct
  REGION 1..120: note = Synthetic Construct
ADVQLVESGGGLVQPGDSMRLSCVASGLTFSRYTMAWFRQAPGKQREFVAGITSGGNANYEDSVKGRFTISRDKNTVYLELSSLKPADTAVYYCHAVGQEASARAPRVYWGQGTQVTVSS

SEQ ID NO: 1894 - protein, 124 aa, synthetic construct
  REGION 1..124: note = Synthetic Construct
AQVQLVESGGGLVQAGGSLRLSCAASGSTFSGNAVGWFRQTPGKERELVATITATSATEFANSVKGRFTISRDNAKNTVYLQMNSLKPEDTAVYYCAAATGADGLRDFRQYPYWGQGTQVTVSS

SEQ ID NO: 1895 - protein, 132 aa, synthetic construct
  REGION 1..132: note = Synthetic Construct
ADVQLVESGGGLVHTGGSLRLSCAASGLSLDSYPIGWFRQAPGKEREGVSCISSSDGSAYYADSVEGRFTISRDNAKNLVYLQMNSLKPEDTAVYYCATDLLRPMMNGKSWWCLNKNDFGSWGQGTQVTVSS

SEQ ID NO: 1896 - protein, 122 aa, synthetic construct
  REGION 1..122: note = Synthetic Construct
AQVQLVESGGGLVQPGDSMRLSCVASGLTFSRYTMAWFRQAPGKDRIFVAAVSKPGGSTYYADSVKGRFTISRDNAKNTLYLQMNSLKPEDTAVYYCVADPQGLVRGEFEHWGKGTQVTVSS

SEQ ID NO: 1897 - protein, 126 aa, synthetic construct
  REGION 1..126: note = Synthetic Construct
ADVQLVESGGGLVQAGGSLRLSCAASGRTFSNDAMAWFRQAPGGRERKFVAGIKWTEGDTEYTDSVKGRFTISRDTVKNMVYLQMNRLRPEDTGVYFCAQSAGGIIGTSIGWYDYWGQGTQVTVSS

SEQ ID NO: 1898 - protein, 119 aa, synthetic construct
  REGION 1..119: note = Synthetic Construct
AQVQLVESGGGLVQAGDSLRLSCVASGRDVSNYGVGWFRQAPGKEREFVASIDWDDGRSYYGDSVRGRFIISLDNAQNTLYLQMNDLKPEDTAIYYCRASPPDRDWDYWGQGTQVTVSS

SEQ ID NO: 1899 - protein, 117 aa, synthetic construct
  REGION 1..117: note = Synthetic Construct
AQVQLVESGGGLVQAGGSLRLTCAASGNIFRLKGMGWYRQAPGKERELVAFITSGGSITYGDSVKGRFTISRDIANDTLYLQMNSLKPEDTAAYYCTIESMTRAQIWGQGTQVTVSS

SEQ ID NO: 1900 - protein, 125 aa, synthetic construct
  REGION 1..125: note = Synthetic Construct
ADVQLVESGGGLVQTGGSLRLSCVASGRTFSTHAMAWFRQAPGKERDFVAAISWNGAGTYYADSVKGRFTISRDNAKNTVYLQMDSLKPEDTAVYYCGISRAIVSGIDANSYDNWGQGTQVTVSS

SEQ ID NO: 1901 - protein, 127 aa, synthetic construct
  REGION 1..127: note = Synthetic Construct
AEVQLVESGGGLVQAGGSLRLSCAASGRTFSNYAMGWFRQAPGKEREFVAAIRSAPVYTDSVKGRFTISRGHDKNTIYLLMNSLRPEDTAVYYCAAEAYPTYCSDSQYGDRYQFCYWGQGTQVTVSS

SEQ ID NO: 1902 - protein, 118 aa, synthetic construct
  REGION 1..118: note = Synthetic Construct
ADVQLVESGGGLVQAGGSLRLSCVASGSTFSLNDISWYRQPPGKQREFVARISSGGRLNYADSVAGRFTISRNNAENTVSLQMNSLKTEDTAVYYCQVTGPRLPDIYWGQGTQVTVSS

SEQ ID NO: 1903 - protein, 122 aa, synthetic construct
  REGION 1..122: note = Synthetic Construct
AHVQLVESGGGLVQAGGSLRLSCAASGSGFESNHMAWYRQAPGKQRELVAGITSGGNSNYADSVKGRFTISRDNTENTIYLQMNSLKPEDTAVYYCNTVAPVEGTGGIRAYWGQGTQVTVSS

SEQ ID NO: 1904 - protein, 124 aa, synthetic construct
  REGION 1..124: note = Synthetic Construct
AEVQLVESGGGSAQPGGSLRLSCAASGFTFSRTFMMWVRQAPGKGPEWVSTIDERGTYPTYTDSVKGRFTTSRDNANNMVYLQMNNLKPDDTAVYYCAQCKNYYICDPSAREWWGRGTQVTVSS

SEQ ID NO: 1905 - protein, 126 aa, synthetic construct
  REGION 1..126: note = Synthetic Construct
AHVQLVESGGGLVQAGGSLRLSCQASGRTFSTYPMGWFRQAPGKERDFVASVTWSGGSPYYADSVKGRFTISRDTAKNTLYLQMDRLQPEDTAVYSCAADRRGDYVLGYHGLYDYWGQGTQVTVSS

SEQ ID NO: 1906 - protein, 116 aa, synthetic construct
  REGION 1..116: note = Synthetic Construct
ADVQLVESGGGLVQAGGSLRLSCAASGSTFSIKTFGWFRQAPGKQRGMVAFIDSTGTTSYGAFVKGRFTISRDNAKNTVYLQMSSLQPDDTAVYSCYAVDDQNGLLGPGDPGHRLS

SEQ ID NO: 1907 - protein, 130 aa, synthetic construct
  REGION 1..130: note = Synthetic Construct
ADVQLVESGGGLVQAGGSLRLSCAASGFGLEDYAIGWFRQDPGYGREWISCISSSDGSTRYSDSVKGRFTISRDNAKNTVYLQMNSLKPEDTAVYHCARDWAHTCPAYGSSRYITDFVSWGQGTQVTVSS

SEQ ID NO: 1908 - protein, 128 aa, synthetic construct
  REGION 1..128: note = Synthetic Construct
AEVQLVESGGGLVQAGGSLRLSCAASGRTFSSYAMGWFRQAPGKEREFVAAITRRGDVTDYADSLKGRFTISRENAKNTVYLQMNSLKPEDTAVYYCAADRTSLSYGFTRNVLQYEYWGQGTQVTVSS

SEQ ID NO: 1909 - protein, 131 aa, synthetic construct
  REGION 1..131: note = Synthetic Construct
AQVQLVESGGGLVQPGGSLRLSCKASGFAFSSYAMSWVRQAPEYGREWVAGIYNDGSNIYYADSVKGRFSISRDNVGNTLYLQLNSLQPNDTALYRCVKEHARGFGGWGNPNPTDLVYDVWGRGTQVTVSS

SEQ ID NO: 1910 - protein, 125 aa, synthetic construct
  REGION 1..125: note = Synthetic Construct
AEVQLVESGGGLVQAGGSLRLSCAASGRDFSAYTMGWFRQAPGKEREFVAAMSGSGRSIYYSDSVKGRFTISRDNAKNTMSLHMKGLKPDDTAVYLCASPYTTAWGTKTSDFDYWGQGTQVTVSS

SEQ ID NO: 1911 - protein, 133 aa, synthetic construct
  REGION 1..133: note = Synthetic Construct
AQVQLVESGGGLVQPGESLRLSCVASGFTLDRYSIGWFRQAPGKEREGVSCISTTDGSTYYADSVKGRFAISKDNAKNTLYLQMNSLKPEDTAVYYCAVDVGRDLCTIVPGTRTITISPFGARGQGTQVTVSS

SEQ ID NO: 1912 - protein, 126 aa, synthetic construct
  REGION 1..126: note = Synthetic Construct
ADVQLVESGGGLVQAGGSLRLTCAASGGTFSTSTMDMGWFRQAPGKEREFVALDSWNDGRAYYADSVKGRFTISRDSAKTTLYLQMNSLKPEDTGVYYCAAETYSIYEKADSWGYWGQGTQVTVSS

SEQ ID NO: 1913 - protein, 133 aa, synthetic construct
  REGION 1..133: note = Synthetic Construct
AQVQLVESGGGLVQAGGSLRLSCAASGFTLDYYTIGWFRQAPGKEREGISCISSRDDFTYYKDSVKGRFTISKDNAENTVYLQMNNLKPEDTGVYYCATEEYSGTDSYTRRGCMTASIWYKYWGQGTQVTVSS

SEQ ID NO: 1914 - protein, 128 aa, synthetic construct
  REGION 1..128: note = Synthetic Construct
ADVQLVESGGGLVQAGGSLRLSCAASGRTFRGYYMAWFRQAPGKEREIVAANRWSGIDTYYSDSVKGRFTLSRDDGESTLYLQMNSLRPEDTAVYYCAAAGTPFSSIDLTRVSGYTYWGQGTQVTVSS

SEQ ID NO: 1915 - protein, 126 aa, synthetic construct
  REGION 1..126: note = Synthetic Construct
ADVQLVESGGGLVQAGGSLRLSCAASGGTFSTSDIGWAWFRQAPGTEREFVGAIRGGPFRPVYADSVEGRFAISRANAKNTVYLQMNSLKPEDTAVYYCAAAKGRYGSIWNDYDYWGQGTQVTVSS

SEQ ID NO: 1916 - protein, 128 aa, synthetic construct
  REGION 1..128: note = Synthetic Construct
AHVQLVESGGGLVQPGASLTLSCTASGLVLRMDSTAWFRQAPGKEREFVGGIIGRRGTTTYEDAVKGRFTISSDDAENTVFLQMKDLKPEDTGVYYCAVETSRRLSALSRRIHDYDYWGQGTQVTVSS

SEQ ID NO: 1917 - protein, 130 aa, synthetic construct
  REGION 1..130: note = Synthetic Construct
AHVQLVESGGGLVQAGGSLRLSCAASGFSLEDYAIGWFRQDPGKGREWVSCISSSDGSTRYSDSVKGRVTISRDNAKNTVYLQMNSLKPEDTAVYHCARDWAHTCPAYGSRRYITDFVSWGQGTQVTVSS

SEQ ID NO: 1918 - protein, 129 aa, synthetic construct
  REGION 1..129: note = Synthetic Construct
AQVQLVESGGGLVQPGGSLRLSCAASGFTFSKYAMSWVRQAPGKGREWVSGIYSDGSETYYAESVKGRFTISRDNAKNTLYLQMNSLKPEDTALYYCAKDENTYEDYFNSNFDRKYDYWGQGTQVTVSS

SEQ ID NO: 1919 - protein, 125 aa, synthetic construct
  REGION 1..125: note = Synthetic Construct
AEVQLVESGGGSVQTGGSLRLSCVASGDIHRIYDMGWYRQAPGKQRELVATTSIAPSRTNYADSVKDRFTISRDDAKNTVYLQMNSLMPEDTAVYYCKMNIGDYRRDTYTGYDTWGQGTQVTVSS

SEQ ID NO: 1920 - protein, 128 aa, synthetic construct
  REGION 1..128: note = Synthetic Construct
AEVQLVESGGRLVQPGDSLRLSCRLSGGMLSHYAMGWFRQAPGKEREFVVTVSPDSSNTRYSNSVKGRFTVSRDNPDNTVYLQLNSLKPEDSAVYYCAAADVSLVWNIVLDVPGYDYWGQGTQVTVSS

SEQ ID NO: 1921 - protein, 124 aa, synthetic construct
  REGION 1..124: note = Synthetic Construct
AEVQLVESGGGLVQAGGSLRLSCAASGSTFSGNAVGWFRQTPGKERELVATITATSATEFANSVKGRFTISRDNAKNTVYLQMNSLKPEDTAVYYCNTCKFGLSVLCHPGQDYWGQGTQVTVSS

SEQ ID NO: 1922 - protein, 130 aa, synthetic construct
  REGION 1..130: note = Synthetic Construct
AHVQLVESGGGLVQAGGSLRLSCAVSGPTGNRWPMGWFRQAPGKEREFVATISWSDSRTYYADSVKGRFTISRDNAKNTVFLQMASLKPEDTAVYYCAAAHGRVYGANWSSSNRYDYDSWGQGTQVTVSS

SEQ ID NO: 1923 - protein, 124 aa, synthetic construct
  REGION 1..124: note = Synthetic Construct
ADVQLVESGGGLVQAGGSLRLSCAASGSTFSGNAIGWYRQAPGKQRELVATINAPGSTDYAESVKGRFTISRDNAKNTVFLQMNSLKPEDTAVYYCNTYKFRLSVLCQPGQDYWGQGTQVTVSS

SEQ ID NO: 1924 - protein, 126 aa, synthetic construct
  REGION 1..126: note = Synthetic Construct
AEVQLVESGGGLVQAGGSLRLSCALSGRTFSNHAMGWFRQAPGKEREYVGGISVSDGLTRYIDSVKGRFTISGDNGKNTVYLQMNSLKPEDTAIYYCATARFQYGYSHDEGEYDYWGQGTQVTVSS

SEQ ID NO: 1925 - protein, 125 aa, synthetic construct
  REGION 1..125: note = Synthetic Construct
AEVQLVESGGGLVQTGGSLRLSCVASGGTLSSYMVGWFRQAPGKERDFVAGISWSGRSTDYEDDVKGRFAISRDAAGVYLQMNTLKPEDTGAYYCAARKVDYSRDYVTNYGYDYWGQGTQVTVSS

SEQ ID NO: 1926 - protein, 127 aa, synthetic construct
  REGION 1..127: note = Synthetic Construct
ADVQLVESGGGLVQAGGSLRLSCVASGGTFTDYAMGWIRQAPGKERELIAAISIGGSTDYADSVKDRFTISRDNAKNTVYLLMSSLKPEDSAIYYCAADRSPLYFALPRSQGQFDYWGQGTQVTVSS

SEQ ID NO: 1927 - protein, 128 aa, synthetic construct
  REGION 1..128: note = Synthetic Construct
AQVQLVESGGGLVQAGGSLRLSCAASGDTFSSSVMGWFRQAPGKEREFVAAISRTGAGTYYADSAKGRFIISRDNTKNTVYLQMNSLKPEDTAVYYSAAAPATLPAATMTEERMWNYWGQGTQVTVSS

SEQ ID NO: 1928 - protein, 126 aa, synthetic construct
  REGION 1..126: note = Synthetic Construct
AEVQLVESGGGLVQAGGSLRLSCAASGGTFRSYNMGWFRQGPGKEREFVAALSWTGVGTYYTDSVKGRFTISRDITKNTVYLQMDSLKPEDTAVYYCAADVNTDRLHSAGTEYRYWGQGTQVTVSS

SEQ ID NO: 1929 - protein, 118 aa, synthetic construct
  REGION 1..118: note = Synthetic Construct
ADVQLVESGGGLVQAGGSLRLSCAASGSIFSINAMGWYRQAPGKPRELVASSGTNGATLYTDSVKGRFTISRASDQRTVYLQMNSLQPEDTAVYYCNLRMADGSPDTWGQGTQVTVSS

SEQ ID NO: 1930 - protein, 124 aa, synthetic construct
  REGION 1..124: note = Synthetic Construct
ADVQLVESGGGLVQPGGSLRLSCVVSGLIFDEPNIGWFRQAPGKDREAVSCVSGDESGTYYGDSVKGRFTISRDKAKRTIYLQMNSLKPEDTAVYYCTIQRSCHLPFDPMHDWRGQGTQVTVSS

SEQ ID NO: 1931 - protein, 126 aa, synthetic construct
  REGION 1..126: note = Synthetic Construct
AQVQLVESGGGLVQAGGSLRLSCTASGGRLSDYALAWFRQAPGKEREFVAAIKRNGATYSPDSVKARFTISRDNVKNTLNLQMNNLKPEDTAIYYCAAREEITSYFRTIASYYNKWGQGTQVTVSS

SEQ ID NO: 1932 - protein, 128 aa, synthetic construct
  REGION 1..128: note = Synthetic Construct
AQVQLVESGGGLVQAGGSLRLSCVASERAFGSHTMGWFRQAPGKEREFVASIRQSTTSADVDYASSVEGRFTISRDNAKNTLYLQMNSLKPEDTAVYYCARRGYYGGTYRFPSDYELWGQGTQVTVSS

SEQ ID NO: 1933 - protein, 127 aa, synthetic construct
  REGION 1..127: note = Synthetic Construct
ADVQLVESGGGLVQAGDSLRLSCAISGLTGTNYAMAWFRQAPGKEREFVARIPRDGDPTAYADSVKGRFTISRDNAKNMGYLQLSSLKPEDTAVYFCAVKQGPLYPYIYLSRGYNHWGRGTQVTVSS

SEQ ID NO: 1934 - protein, 125 aa, synthetic construct
  REGION 1..125: note = Synthetic Construct
AHVQLVESGGGLVQAGGSLRLSCTASGNIHRIYDMGWYRQAPGKQRELVATTSIAPSRTNYADSVKDRFSISRDDAKNTVYLQMNSLMPDDTAVYYCKMNIGDYMRDPYTGHDTWGQGTQVTVSS

SEQ ID NO: 1935 - protein, 126 aa, synthetic construct
  REGION 1..126: note = Synthetic Construct
AQVQLVESGGGLVQAGGSLRLSCAASGGTFSSYAMGWFRQVPGKEREFVAAISWNGGSTYYADSVKGRFTISRDNDKNTVFLRMNGLKPEDTAVYYCAARKETTVVTMSVRDYSYWGQGTQVTVSS

SEQ ID NO: 1936 - protein, 127 aa, synthetic construct
  REGION 1..127: note = Synthetic Construct
AQVQLVESGGGLVQPGGSLRLSCAVSGFTFDAYAIAWYRQGPGSEREEVSCISAKGDETYYLDSVKGRFTISRDKARKMGYLQMTNVKPDDTAVYYCAVDSRGCAWGGSAYYTFSYWGRGTQVTVSS

SEQ ID NO: 1937 - protein, 125 aa, synthetic construct
  REGION 1..125: note = Synthetic Construct
ADVQLVESGGGLVQAGGSLRLSCAASGRTFADYAVGWFRQAPGKEREFVASISWTGDSTFYADSVKGRFTISRDIHKNTVYLQMDSLKPEDTAVYYCAANKRSPYHTSSGLIEFWGQGTQVTVSS

SEQ ID NO: 1938 - protein, 126 aa, synthetic construct
  REGION 1..126: note = Synthetic Construct
AQVQLVESGGGLVQAGGSLRLTCAASGRTFSTDTMDMGWFRQAPGKERQFVALDAWNDGRTYYADSVKGRFTISRDNAKTTLYLQMNSLKPEDTAVYYCAADTYSLYEKASSWGYWGQGTQVTVSS

SEQ ID NO: 1939 - protein, 123 aa, synthetic construct
  REGION 1..123: note = Synthetic Construct
AQVQLVESGGGLVQAGGSLRLSCAASGVTADNYRMAWFRQVPGKEREIVARINWNGGSINYADPVKGRFTISIDNAKKMVYLQMNSLKPEDTAVYYCAARSGFGLGVLKYDYWGQGTQVTVSS

SEQ ID NO: 1940 - protein, 127 aa, synthetic construct
  REGION 1..127: note = Synthetic Construct
AQVQLVESGGGLVQAGGSLRLSCAISGLTGTNYAMAWFRQAPGKEREFVARIPRDGDPTAYADSVKGRFTISRDNAKNMGYLQLSSLKPEDTAVYFCAVKQGPLYPYIYLSRGYDHWGRGTQVTVSS

SEQ ID NO: 1941 - protein, 126 aa, synthetic construct
  REGION 1..126: note = Synthetic Construct
AEVQLVESGGGLVQAGDSLRLSCAASGRIFRSLTMAWFRQAPGKEREFVTVIYADDVTTYYADSVKGRFTISRDNAKNTVYLQMNSLNPEDTAVYYCAADFGMSYYYMRTSEYEYWGQGTQVTVSS

SEQ ID NO: 1942 - protein, 123 aa, synthetic construct
  REGION 1..123: note = Synthetic Construct
AQVQLVESGGGLVQAGGSLRLSCAASGSIFRISAMGWYHQAPGKQRELVAKLTSGNSPNYADYVEGRFTISRDNAKPTVTLQMNNLRPEDTAVYYCNARLLTPPPILDLKDFWGQGTQVTVSS

SEQ ID NO: 1943 - protein, 123 aa, synthetic construct
  REGION 1..123: note = Synthetic Construct
AQVQLVESGGGLVQAGGSLTLSCVASGSGFEPNAISWYRQAPGKQRELVAGITSGGNAHYTDSVKGRFTISRDNVKNTVYLQMNSLKPEDTAVYYCNAVGPRINPPGTPTNYWGQGTQVTVSS

SEQ ID NO: 1944 - protein, 123 aa, synthetic construct
  REGION 1..123: note = Synthetic Construct
AHVQLVESGGGLVQPGGSLRLSCVASGSGFEPNAMAWYRQAPGKQRELVAGITSGGNPNYADAVKGRFTISRDNVKNTVYLQMNSLKPEDTAVYYCNAVGPRINPPGSPTNYWGQGTQVTVSS

SEQ ID NO: 1945 - protein, 127 aa, synthetic construct
  REGION 1..127: note = Synthetic Construct
AEVQLVESGGGLVQAGGSVRLSCAASGGTFSRSAMGWFRQGPGKEREFVTAITCSGDTAWYEDSVKGRFTISRDNAKNTVYLQMNSLKPEDTAVYYCVADKACFNAHYYRPRDYDYWGQGTQVTVSS

SEQ ID NO: 1946 - protein, 132 aa, synthetic construct
  REGION 1..132: note = Synthetic Construct
AEVQLVESGGGLVQAGGSLRLSCAASGFTLDNYAIGWFRQAPGKEREGVSCISSSTGSAYYADSVKGRFTISRDNAKNMMYLQMNSLEPEDTAVYYCATDLLRRMLPGSSWWCLNPNDFGSWGQGTQVTVSS

SEQ ID NO: 1947 - protein, 126 aa, synthetic construct
  REGION 1..126: note = Synthetic Construct
AEVQLVESGGGLVQAGGSLRLSCTASGHTLRSYNMGWFRQAPGKEREFVATLSWTGIGTYYADSVQGRFTISRDITKNTVYLQMDSLKPEDTAVYYCAADTTLDRLHSEGSDYRYWGQGTQVTVSS

SEQ ID NO: 1948 - protein, 124 aa, synthetic construct
  REGION 1..124: note = Synthetic Construct
AEVQLVESGGGLVQAGGSLRLSCAASGTINRIYDIAWYRQIPAKQREVVATITYNSRTNYADSVKGRFTISRDDAQNAAYLQMDNLMPEDTAVYYCKMSIGDYMRDPYIGSDTWGQGTQVTVSS

SEQ ID NO: 1949 - protein, 132 aa, synthetic construct
  REGION 1..132: note = Synthetic Construct
AQVQLVESGGGLVQAGGSLRLSCAASGLTLDYYPIGWFRQAPGKEREGVSCISSSDGSAYYADSVKGRFTISRDNAKNMVYLQMNSLKPEDTAVYYCATDLLRRMMSGSSWWCLNKNDFGSWGQGTQVTVSS

SEQ ID NO: 1950 - protein, 124 aa, synthetic construct
  REGION 1..124: note = Synthetic Construct
ADVQLVESGGGLVQAGGSLRLSCAASGSTFSGNAIGWFRQAPGKQRELVATINAPGSTDYAESVKGRFAISRDNAKNTVFLQMNSLKPEDTAVYYCNTCKFRLSALCHPGQDYWGQGTQVTVSS

SEQ ID NO: 1951 - protein, 123 aa, synthetic construct
  REGION 1..123: note = Synthetic Construct
AQVQLVESGGGLVQPGGSLTLSCAASGRDFSTHAMGWFRQAPGKEREFVATITWDGGSADYAHSVKGRFTFSRDNVKNMAYLQMNSLKPEDTAVYYCAAGYNPTSRSSMYDYWGQGTQVTVSS

SEQ ID NO: 1952 - protein, 127 aa, synthetic construct
  REGION 1..127: note = Synthetic Construct
AHVQLVESGGGLVQAGGSLRLSCAASGRSFSLYTMVAWFRQAPGKEREFVAAMRWSATTKNYADFVKGRFTISGDSAANTVHLQMNSLRPEDTAVYFCAAAPGVFQFSMDKGAYTYWGQGTQVTVSS

SEQ ID NO: 1953 - protein, 125 aa, synthetic construct
  REGION 1..125: note = Synthetic Construct
AQVQLVESGGGLVQTGASLRLSCTASGDTSDYVGVGWFRQAPGKEREVVAAIRWRADARYYADSVKGRFTISRDDTKKTVYLQMNSLEPEDTATYTCAAQRGVFPLGDASRYAYWGQGTQVTVSS

SEQ ID NO: 1954 - protein, 123 aa, synthetic construct
  REGION 1..123: note = Synthetic Construct
AQVQLVESGGGLVQAGGSLRLSCAASGRTFSSYAMGWFRQAPGKERELVACIDNKQRTTYGDSVKGRFTISGLDVKNTAYLEMNNLKAEDTAVYYCTADRSTCFSNYRLYDYWDQGTQVTVSS

SEQ ID NO: 1955 - protein, 126 aa, synthetic construct
  REGION 1..126: note = Synthetic Construct
AQVQLVESGGGLVQAGASLRLSCAASGRTASDYVMGWFRQAAGKEREFVAHISWSGDETNYADSVRGRFIISRDNAENTVYLQMNSLKPEDTAVYYCAADRGYSLMYYRSSEYTYWGQGTQVTVSS

SEQ ID NO: 1956 - protein, 125 aa, synthetic construct
  REGION 1..125: note = Synthetic Construct
AEVQLVESGGGLVQSGGSLRLSCAASGRTWSDYTMGWFRQAPGKEREFVAAMSGSGLSIQYADFVKGRFTISRDNAKNTVYLHMNSLKPDDTAVYYCASPFTTAWGTKLSDYDYWGQGTQVTVSS

SEQ ID NO: 1957 - protein, 126 aa, synthetic construct
  REGION 1..126: note = Synthetic Construct
AEVQLVESGGGLVQAGGSLRLTCAASGGTFSTSTMDMGWFRQAPGKQREFVAVDAWNDGRAYYADSVKGRFTISRDSAKTTVYLQMNSLKPEDTAVYYCAAETYSVYKDENSWGYWGQGTQVTVSS

SEQ ID NO: 1958 - protein, 127 aa, synthetic construct
  REGION 1..127: note = Synthetic Construct
AHVQLVESGGGSVQAGGSLRLSCAASGRTWGTYDMAWFRQAPGKEREFVGGINWSGDQTNYADSVKGRFTISRDNAKNTVYLQMNSLKPEDTAVYYCAQSRYRSSRPMGNIIDYRYWGQGTQVTVSS

SEQ ID NO: 1959 - protein, 125 aa, synthetic construct
  REGION 1..125: note = Synthetic Construct
AHVQLVESGGGLVQAGGSLRLSCSASGRTFSTSHMGWFRQAPGKEREFVAVISRSGGSTLDADSVKGRFTISRDNAKNTVYLQMNNLKPEDTAVYYCAGSRTAGLTSNRHLYDYWGQGTQVTVSS

SEQ ID NO: 1960 - protein, 125 aa, synthetic construct
  REGION 1..125: note = Synthetic Construct
AHVQLVESGGGLVQAGGSLRLSCAASGITWPHYYIGWYRQAPGKERVMISYISMSDGSTFYADSVKGRFTISRDNDKNTVYLQMNSLKPEDTDVYYCATARSHDTLMGTGLLDWWGRGTQVTVSS

SEQ ID NO: 1961 - protein, 127 aa, synthetic construct
  REGION 1..127: note = Synthetic Construct
AEVQLVESGGGLVQAGGSLRLSCVASGGTFSSYAMGWFRQAPGKEREFVAAISQGGSTDYADSVKGRLTISRDNAKNTVYLQIYSLKPEDTAVYYCAADRAPLRFAIPRTHGQYDYWGQGTQVTVSS

SEQ ID NO: 1962 - protein, 120 aa, synthetic construct
  REGION 1..120: note = Synthetic Construct
ADVQLVESGGGLVQAGGSLRLSCVASGTISTLNAMGWYRQAPGKQRELVASISNLGTTYHADSVKGRFTISRGETRHTVYLQMNSLQPDDTAAYYCNTRVLEGTGYRDYWGQGTQVTVSS

SEQ ID NO: 1963 - protein, 128 aa, synthetic construct
  REGION 1..128: note = Synthetic Construct
ADVQLVESGGGLVQAGGSLRLSCAASGGTLNTYAMGWFRQAPGKERELVAAISRSASYTYYTDSVEGRFTISRDNAKNTVNIEMNSLKFEDTAVYYCAASRTVLDDGVKLYGNHYDYWGQGTQVTVSS

SEQ ID NO: 1964 - protein, 127 aa, synthetic construct
  REGION 1..127: note = Synthetic Construct
AQVQLVESGGGLVQPGTSLRLSCAVSGGTFSTYGMAWFRQGPGTEREFVASISASGDKTDYERWAQGRFTISRDNAKNTVYLHMNSLKPEDTAVYYCAASYYSGSQRFPRLMDYDFWGQGTQVTVSS

SEQ ID NO: 1965 - protein, 131 aa, synthetic construct
  REGION 1..131: note = Synthetic Construct
AHVQLVESGGGLVQPGGSLRLSCKASGFAFSSYAMSWVRQAPTYGREWVAGIYNDGSHIYYADSVKGRFSISRDNVGNTLYLQLNSLQPNDTALYRCVQEHARGFGGWGNPNPSDLVYRAWGRGTQVTVSS

SEQ ID NO: 1966 - protein, 126 aa, synthetic construct
  REGION 1..126: note = Synthetic Construct
ADVQLVESGGGLVQAGGSLRLTCAASGGTFSTSTMDMGWFRQAPGKEREFVALDAWNDGRAYYADSVKGRFTISRDSAKTTLYLQMNSLKPEDTAVYYCAAETYSIYEKASSWGYWGQGTQVTVSS

SEQ ID NO: 1967 - protein, 124 aa, synthetic construct
  REGION 1..124: note = Synthetic Construct
AQVQLVESGGGLVQPGGSLRLSCAASGRTFSTHYMGWFRQAPGKEREFVAAISKIGGRTYYADSVKGRFTISEDSAKNTVTLQMKRLEPEDTAVYYCAAASTNTPVTVAAVDYWGQGTQVTVSS

SEQ ID NO: 1968 - protein, 125 aa, synthetic construct
  REGION 1..125: note = Synthetic Construct
AHVQLVESGGGLVQAGASLRLSCVASGRTLSALEMGWFRQSPGKEREFVSLISRNGDTTEYSDSVKGRFTVSRDNAKNTLYLQMNRLKPEDTAIYYCAADPNLHHLRIGDPYYEWGQGTQVTVSS

SEQ ID NO: 1969 - protein, 123 aa, synthetic construct
  REGION 1..123: note = Synthetic Construct
AHVQLVESGGGLVQAGGSLRLSCVASGSGFEPNHMAWYRQAPGKQRELVAGITSGGNANYADSVKDRFTISRDNVKNTVYLQMNNLKPEDTAVYYCNTVAPGINPRGSPTNYWGQGTQVTVSS

SEQ ID NO: 1970 - protein, 132 aa, synthetic construct
  REGION 1..132: note = Synthetic Construct
AQVQLVESGGGLVQAGGSLRLSCAASGFTFSNYGMSWVRQAPGKGREWVSGIASDGSNTDYVDSVKGRFTISRDNSKNTLYLQMNSLKFEDTAVYYCVKKTRPGRYSGSDFYYRDLNDYDNWGQGTQVTVSS

SEQ ID NO: 1971 - protein, 132 aa, synthetic construct
  REGION 1..132: note = Synthetic Construct
ADVQLVESGGGLVQPGGSLRLSCAASGFTFSNYGMSWVRQAPGKGREWVSGIASDGSNTDYVDSVKGRFTISRDNSKNTLYLQMNSLKFEDTAVYYCIKKTRPGRYSGSDFYYRNLNDYDNWGQGTQVTVSS

SEQ ID NO: 1972 - protein, 126 aa, synthetic construct
  REGION 1..126: note = Synthetic Construct
AQVQLVESGGGLVQAGGSLRLSCAASGRTFSSYTVDWYRQAPGQEREFVIGIDESGDSKYYSDSVRGRFTISRDNAKNTVYLEMHRLKPDDTAVYYCAACSASHYYCSGASKYDFWGQGTQVTVSS

SEQ ID NO: 1973 - protein, 128 aa, synthetic construct
  REGION 1..128: note = Synthetic Construct
AQVQLVESGGGLVQAGTSLRLSCKASVRTYAMGWFRQAPGKEREFLAAVRWSSGTTFYSDSVKGRFIIFGDNAKNTVDLQMNSLIPEDTAVYYCAGDSAPGTSPDRNYYTRQIGYDYWGRGTQVTVSS

SEQ ID NO: 1974 - protein, 124 aa, synthetic construct
  REGION 1..124: note = Synthetic Construct
AHVQLVESGGGLVQAGGSLRLSCAASGSTFSGNAIGWFRQAPGKERELVATINAPGSTDYAESVKGRFTISRDNAKNMVLLQMNSLKPEDTAVYYCNTRKFRLSVLCHPGQDYWGQGTQVTVSS

SEQ ID NO: 1975 - protein, 128 aa, synthetic construct
  REGION 1..128: note = Synthetic Construct
ADVQLVESGGGRVQVGGSLRLSCAASGRFFSVSGVGWYRQAPGEQREDQREQVAAITSGGRIMYADSVKGRFTISRDNARNMFYLQMNSLKPEDSAIYYCKAEHTVVGGGDLRVNDYWGQGTQVTVSS

SEQ ID NO: 1976 - protein, 126 aa, synthetic construct
  REGION 1..126: note = Synthetic Construct
AQVQLVESGGRLVQAGESLRLSCVASGGRLSDYGLAWFRQAAGKEREFVAAIKRNGATYLPESTKGRFIISRDSSENRLYLQMNNLKPDDTAVYYCAAREEITSYFRTSAGYYNRWGQGTQVTVSS

SEQ ID NO: 1977 - protein, 127 aa, synthetic construct
  REGION 1..127: note = Synthetic Construct
AQVQLVESGGGLVQAGGSLRLACAVSGGSFGDYAMGWFRQSPGKEREFVAVITIGRSTDYADSVKGRFTISRDNAKNTVYLQMNSLKPEDTAVYYCAADQAPLRFSYSLRRDEYDYWGQGTQVTVSS

SEQ ID NO: 1978 - protein, 118 aa, synthetic construct
  REGION 1..118: note = Synthetic Construct
AEVQLVESGGGLVQAGGSLRLSCVASGSTFSLNDIGWYRQPPGKQREFVARISSGGRLNYADSVQGRFTISRNNAENTVYLQMNSLKTEDTAVYYCQVTGPRLPEIYWGQGTQVTVSS

SEQ ID NO: 1979 - protein, 128 aa, synthetic construct
  REGION 1..128: note = Synthetic Construct
AHVQLVESGGGLVQPGASLTLSCTASGLVLRMYSTAWFRQAPGKEREFVAGIMRTGGTTTYEDAVKGRFTISRDDAENTVYLQMKNLKPEDTGVYYCAVETSRRLSTLSQRIHDYDYWGQGTQVTVSS

SEQ ID NO: 1980 - protein, 127 aa, synthetic construct
  REGION 1..127: note = Synthetic Construct
ADVQLVESGGGLVQAGGSLRLSCVASGRFTDGMGWFRQALGKEREFVAAIRWSGGSTYYLDSVKGRFTISGDSAKNTVYLQMNSLKPEDTAVYLCAARTYSSLIVYSPYSTEGYDNYGQGTQVTVSS

SEQ ID NO: 1981 - protein, 126 aa, synthetic construct
  REGION 1..126: note = Synthetic Construct
ADVQLVESGGGLVEVGDSLRLSCAASGGTFSNYIMGWFRQAPGKEREFVAAISRSGGSPFYADSVKGRFTISRDNAKNTVYLQMNDLKPEDTAVYYCAADRDSVLLTSTPLRYDYWGQGTQVTVSS

SEQ ID NO: 1982 - protein, 129 aa, synthetic construct
  REGION 1..129: note = Synthetic Construct
AQVQLVESGGGLVQAGASLRLSCAASGRTASSEFMGWFRQAPGKEREFVAAMTWDGDSTYYTDSVKGRFTISRDSAKNTVYLQMNNLKPEDTAVYYCAADRSIYQSYYSAQYPNNYEYWGQGTQVTVSS

SEQ ID NO: 1983 - protein, 128 aa, synthetic construct
  REGION 1..128: note = Synthetic Construct
AQVQLVESGGGLVQAGGSLRLSCAASGGTFSRFAAGWFRQAPGKEREFVAVIDWNGGSAYYADSVKGRFTISRDNAKSTVYLQMNRLKPGDTAVYTCAIGGNHYDPKKYYIADEYDYWGQGTQVTVSS

SEQ ID NO: 1984 - protein, 128 aa, synthetic construct
  REGION 1..128: note = Synthetic Construct
AHVQLVESGGRLVQTGDSLTLSCLVSGYTFSTFPTAWFRQAPGKEREFVAGIRWNGRSRDYTEYADFVKGRFTISRDNAKNMLYLQMISLKPEDTALYYCAASDGVIDGTSAPSYRYWGQGTQVTVSS

SEQ ID NO: 1985 - protein, 126 aa, synthetic construct
  REGION 1..126: note = Synthetic Construct
AHVQLVESGGGLVQPGGSLRLSCAVSGYALDRYSIGWFRQAPGKKREAVSCINSDGEIQTYLDSQKGRFAISRDKVKNTVYLQMNSLEPEDTAIYYCAARPGITICLDGTHWPGHWGQGTQVTVSS

SEQ ID NO: 1986 - protein, 127 aa, synthetic construct
  REGION 1..127: note = Synthetic Construct
ADVQLVESGGGLVQAGGSLRLSCVASGGTFSDYAMGWIRQAPGKERELVAAISIGGSTDYADSVKGRFTISRDNAKNTVYLSMISLKPEDTAVYYCAADRSPLHFALPRSQGQFDYWGQGTQVTVSS

SEQ ID NO: 1987 - protein, 126 aa, synthetic construct
  REGION 1..126: note = Synthetic Construct
AQVQLVESGGGLVQAGDSLTLSCEASGRTLRSYNMGWFRQAPGKEREFVAASSWTGIGTYYADSVKGRFTISRDNLKNTLFLQMESLKPEDTAVYYCAADSTVDRLHSAGTDYRYWGQGTQVTVSS

SEQ ID NO: 1988 - protein, 124 aa, synthetic construct
  REGION 1..124: note = Synthetic Construct
AEVQLVESGGGLVQTGGSLRLSCAASGFSLDDYAVTWFRQAPGKEREGVSSISGDGSANYADSVQGRFTISRDNAKNTVYLQLTRLKPADTATYVCAALKEVVAGIAPDEYDYWGQGTQVTVSS

SEQ ID NO: 1989 - protein, 123 aa, synthetic construct
  REGION 1..123: note = Synthetic Construct
AEVQLVESGGGLLQTGDSLRLSCVASGRTLYTNAMGWFRQAPGKEREFVAAIGWNAYSVLYADSVKGRFTISRENAKNTVYLQMNSLKPEDTAIYYCAARSTAAVGYDEFNYWGRGTQVTVSS

SEQ ID NO: 1990 - protein, 129 aa, synthetic construct
  REGION 1..129: note = Synthetic Construct
AQVQLVESGGGLVQAGDSLSLSCAASGGAFSRYDMGWFRQAPGKEREFVIAIARNGAKTYASDSVKGRFTIARDNAKNTVLLQMNSLKPEDTAVYYCAADTAPKYALHASDQSRDYDYWGRGTQVTVSS

SEQ ID NO: 1991 - protein, 121 aa, synthetic construct
  REGION 1..121: note = Synthetic Construct
AQVQLVESGGGLVQAGGSLRLSCVPSSNIFSANAMGWYRQAPGEQRELVASITSGGNTDYADSVKGRFTISRDNADTVILQMNSLKPEDTAVYYCKGTAYSTTYKSVRDYWGQGTQVTVSS

SEQ ID NO: 1992 - protein, 130 aa, synthetic construct
  REGION 1..130: note = Synthetic Construct
ADVQLVESGGGLVQPGGSLRLSCKASGFTLNELAIGWLRQAPGKEREGVSCISSSDGSTYYADSVKGRFTISRDNAKNTVYLQMNDLKPEDTAVYYCTTDYSSSRAPCGSLRSGIWGNFRGQGTQVTVSS

SEQ ID NO: 1993 - protein, 125 aa, synthetic construct
  REGION 1..125: note = Synthetic Construct
AHVQLVESGGGLVQTGGSLRLSCAASGGTFSTHAMAWFRQAPGKERDFVAAISWSGTGTYYADSVKGRFTISRDNAKKTVYLQMNSLKPEDTAVYYCGISRAIVSGIDANSYDFWGQGTQVTVSS

SEQ ID NO: 1994 - protein, 131 aa, synthetic construct
  REGION 1..131: note = Synthetic Construct
ADVQLVESGGGLVQPGGSLRLSCVASGFTLDSTAIAWFRQAPGKEREGVSCLSSRDGSTFIQYSLKDRLTISSDNDKNTVYLQMNSLKPEDTAKYYCAAALGADSQRTVIAGCPIRYFTSWGQGTQVTVSS

SEQ ID NO: 1995 - protein, 129 aa, synthetic construct
  REGION 1..129: note = Synthetic Construct
AHVQLVESGGGLVQAGDSLRLSCATSRRPNHISAMGWFRQAPGKDREFVATIRWNDGSTFYGGSVQGRFTVSRGDAENTVHLQMDNLKPEDTAVYYCVLRQLTYTGNYVPRNDYDYATWGQGTQVTVSS

SEQ ID NO: 1996 - protein, 130 aa, synthetic construct
  REGION 1..130: note = Synthetic Construct
ADVQLVESGGGLVQAGGSLRLSCAASGFGLEDYAIGWFRQDPGKGREWISCISSSDGSTRYSDSVKGRFTISRDNAKNTVYLQMNSLKPEDTAVYHCARDWAHTCPAYGSSRYITDFVAWGQGTQVTVSS

SEQ ID NO: 1997 - protein, 126 aa, synthetic construct
  REGION 1..126: note = Synthetic Construct
AHVQLVESGGRLVQAGGSLRLSCAASGGRLSDYALAWFRQAPGKEREFVAAIKRNGATYSPDSVKDRFIISRDNSGNTLYLQMNNLKPEDTAVYYCAAREEITSYFRTNAGYYNRWGQGTQVTVSS

SEQ ID NO: 1998 - protein, 115 aa, synthetic construct
  REGION 1..115: note = Synthetic Construct
AHVQLVESGGGLVQAGGSFSIYAMGWFRQAPGKEREFVASISRAGLSTDYADSVKGRFTISKDNAGTTAYLQMDSLKPEDTAVYYCAADPWAGGPLAVATQYTYWGQGTQVTVSS

SEQ ID NO: 1999 - protein, 125 aa, synthetic construct
  REGION 1..125: note = Synthetic Construct
AHVQLVESGGGFVHAGGSLRLSCAASGRIFSYSHMGWFRQAPGKEREFVAVISRSGGSTLDADSVKGRFTMSRDNAKNTVYLQMNSLKPEDTAAYYCAASQTAGLTSNPSLYNYWGQGTQVTVSS

SEQ ID NO: 2000 - protein, 128 aa, synthetic construct
  REGION 1..128: note = Synthetic Construct
AHVQLVESGGGLVQTGGSLRLSCAVSGYTFSIFPLAWFRQAPGKEREFVAGIRWNGHSRDYEEYADFAKGRFTISRDNAKNMVYLQMISLKPEDTALYYCAASDGVIDGTKANGYRYWGQGTQVTVSS

SEQ ID NO: 2001 - protein, 114 aa, synthetic construct
  REGION 1..114: note = Synthetic Construct
AHVQLVESGGGLVQAGGSLRLSCAASGSIFSNKAMGWFRQAPGKQRELVASITSGRTTNYADSVKGRFAISRDNAKNMVYLQMNSLKPEDTAVYYCKSLSYPYWGQGTQVTVSS

SEQ ID NO: 2002 - protein, 126 aa, synthetic construct
  REGION 1..126: note = Synthetic Construct
AHVQLVESGGGLVQAGDSLRLTCTASGGTFSSSTMDMGWFRQAPGKEREFVAAHSWNDGRTYYATSVKGRFTISRDNAKTTLYLQMNSLKPEDTAVYYCAADSYSIYEKDSSWEYWGQGTQVTVSS

SEQ ID NO: 2003 - protein, 134 aa, synthetic construct
  REGION 1..134: note = Synthetic Construct
AHVQLVESGGGLVQPGGSLRLSCAASGFNADTLAIGWFRQAPGKEREGISCISRVGGGSYYAEPVKGRFTISRDSAKNTVYLQMDSLKPEDTAIYYCATALELRSCSLGLLVPWSEFVPKYEYWGQGTQVTVSS

SEQ ID NO: 2004 - protein, 125 aa, synthetic construct
  REGION 1..125: note = Synthetic Construct
ADVQLVESGGGLVQAGDSLRLSCASSGRTFNNYIIGWFRQAPGKEREFVGSITRTGGSTYYGDSVKGRFTISRDNAKNTVYLQMNSLKPEDTAVYYCAAAGGVLLTDTPRRYDYWGQGTQVTVSS

SEQ ID NO: 2005 - protein, 124 aa, synthetic construct
  REGION 1..124: note = Synthetic Construct
AEVQLVESGGGSVQTGGSLRLSCVASGDIHRIYDMGWYRQAPGKQRELVATTSIAPSRTNYADSVKDRFTISRDDAKNTVYLQMNSLMPEDTAVYYCKMNIGDYRRDPYTGYDTWGQGPRSPSS

SEQ ID NO: 2006 - protein, 121 aa, synthetic construct
  REGION 1..121: note = Synthetic Construct
ADVQLVESGGGLVQAGGSLRLSCVPSTNIFSANAMAWYRQAPGKERDLVASITSGGNADYADSVKGRFTISRDDADTVILQMDNLKPEDTAVYYCKGTAYSATYNSVRDYWGQGTQVTVSS

SEQ ID NO: 2007 - protein, 122 aa, synthetic construct
  REGION 1..122: note = Synthetic Construct
AQVQLVESGGGLVQAGGSLRLSCTTSGLTLSRYSMAWFRQAPGKEREFVAAISRDGGRTPYVASAKGRFTISRDNAKNTANLQMNSLKPEDTAIYYCDLRQDCTRSGCDEYRGQGTQVTVSS

SEQ ID NO: 2008 - protein, 122 aa, synthetic construct
  REGION 1..122: note = Synthetic Construct
AHVQLVESGGGLVQAGGSLRLSCVVSGRTYSDFIVGWFRQAPGKEREFVALISQSGGTTGYADSVKGRFTISRDNAANTVFLQMNSLKPEDTAVYYCAVGRIISTTPRDYEYWARGPRSPSS

SEQ ID NO: 2009 - protein, 127 aa, synthetic construct
  REGION 1..127: note = Synthetic Construct
AEVQLVESGGGLVQAGHSLRLSCTASGSTFSAYGMGWFRQAPGKEREFVAGIARSGSDFYGDSVKGRFTISRDNARNTVYLQMNSLKPEDTALYYCAADRTILYHGISQRTQNYQYWGPGTQVTVSS

SEQ ID NO: 2010 - protein, 125 aa, synthetic construct
  REGION 1..125: note = Synthetic Construct
AQVQLVESGGGLVQAGASLRLSCASSETANSINAIGWYRQAPGKQREVVAVVSGGGTTYYADSAKGRFTISRTISTDNAKTMVYLQMNNLKPEDTAAYYCNIHAGNTLYRSGHYWGQGTQVTVSS

SEQ ID NO: 2011 - protein, 124 aa, synthetic construct
  REGION 1..124: note = Synthetic Construct
AQVQLVESGGGLVQAGGSLRLSCAASGSTFSGNAIGWFRQAPGKERELVATINAPGSTDYAESVKGRFTISRDNAKNMVLLQMNSLKPEDTAVYYCNTCEFRLSVLCHPGQDYWGQGTQVTVSS

SEQ ID NO: 2012 - protein, 123 aa, synthetic construct
  REGION 1..123: note = Synthetic Construct
AHVQLVESGGGLVQAGGSLRLSCAASGSIINFNSMGWYRQAPGQQRELVASITHEGNPNYSDYVKGRFTISQEKGKRTVHLQMNNLGPEDTAVYYCNARLLTPPPILDLKSFWGQGTQVTVSS

SEQ ID NO: 2013 - protein, 126 aa, synthetic construct
  REGION 1..126: note = Synthetic Construct
ADVQLVESGGGLVQAGGSLTLSCEATQGRLSDYALAWFRRAPGKEREFVAAIKRNGASYSPDSVKGRFTISRNNDKNTLYLQMNDLKPEDTAVYYCAAREEITSYFRTIASYYNRWGQGTQVTVSS

SEQ ID NO: 2014 - protein, 124 aa, synthetic construct
  REGION 1..124: note = Synthetic Construct
AHVQLVESGGGLVQAGGSLRLSCAASGGTFSTYGMAWFRQAPGTEREFVAAIRGGAYGPVYAEAVQGRFTISRDNAKNTAYLQMNSLKPEDTAVYYCAAAQGRYGSIWDHYDYWGQGTQVTVSS

SEQ ID NO: 2015 - protein, 125 aa, synthetic construct
  REGION 1..125: note = Synthetic Construct
AQVQLVESGGGLVQAGGSLRLSCAASGGTFSNNAMGWFRRAPGKEREFVALITQIDGATYYADSVKGRFTVFRDNAKVYLGMNSLKPEDTAIYYCAAARWDYNLHYYRDGDYDYWGQGTQVTVSS

SEQ ID NO: 2016 - protein, 124 aa, synthetic construct
  REGION 1..124: note = Synthetic Construct
AHVQLVESGGGLVQAGGSLRLSCAASGSTFSGNAIGWFRQAPGKQRELVATINAPGSTDYSESVKGRFTISRDNAKNTVFLQMNSLKPEDTAVYYCNTCKFRLSVICHAGQDYWGQGTQVTVSS

SEQ ID NO: 2017 - protein, 125 aa, synthetic construct
  REGION 1..125: note = Synthetic Construct
AEVQLVESGGGSVQTGGSLRLSCAASGTIHRVYDMGWYRQAPGKQRELVATTSIAPSRTNYADSVKDRFTISRDDSKNEVYLQMNSLMPEDTAVYYCKMNIGDYRRDPYTGYDPWGQGTQVTVSS

SEQ ID NO: 2018 - protein, 121 aa, synthetic construct
  REGION 1..121: note = Synthetic Construct
ADVQLVESGGGLVQAGGTLRLSCTASGIILSGYGMGWFRGKEREFVAAIDRSGHLTDYADSAKGRFTISRDNDKNTVYLEMNSLKPEDTGVYFCGADGKGGGRYSYRYDHWGQGTQVTVSS

SEQ ID NO: 2019 - protein, 121 aa, synthetic construct
  REGION 1..121: note = Synthetic Construct
AQVQLVESGGGLVQPGGSLKLSCVPSTNIFSANAMAWYRQAPGKERELVAGITSGGNANYADSVKGRFTISRDNADTVILQMNSLKPEDTAVYYCKGTAYSPTYHSVRDYWGQGTQVTVSS

SEQ ID NO: 2020 - protein, 124 aa, synthetic construct
  REGION 1..124: note = Synthetic Construct
AEVQLVESGGGLVQAGGSLRLSCAASGRTFRPYSMAWFRQAPGKEREFVAVIRWGGGSTYYGDSVKGRFTISRDNAKNTGYLQMNSLKLEDTAVYHCAVTYRGGDYAVPASYDFGARGPRSPSS

SEQ ID NO: 2021 - protein, 126 aa, synthetic construct
  REGION 1..126: note = Synthetic Construct
AQVQLVESGGGLVQAGGSLRLSCAVSGGTFRSYNMGWFRQGPGKEREFVATLSWTGVGTYYTDSVKGRFTISRDITKNTVYLQMDSLKPEDTAVYYCAADVNTDRLHSAGTDYRYWGQGTQVTVSS

SEQ ID NO: 2022 - protein, 127 aa, synthetic construct
  REGION 1..127: note = Synthetic Construct
ADVQLVESGGGLVQAGGSLKLSCLASGLTFSNYAMGWFRQSPGKEREFVAVISSGRSTDYADSVKGRFTITRDNARNTVYLQMNSLKPEDTAVYYCAADQAPLRFAYSLSRDEYDYWGQGTQVTVSS

SEQ ID NO: 2023 - protein, 128 aa, synthetic construct
  REGION 1..128: note = Synthetic Construct
ADVQLVESGGGLVQAGGSLRLSCAASGDMQTNPAMAWFRQAPGKEREFVAALRWDGTYPFIVDSLRGRVTIFRDDAKSTVDLQMNALKPEDTAVYYCAASDRFYSGRYALGPGNMHYWGKGTQVTVSS

SEQ ID NO: 2024 - protein, 115 aa, synthetic construct
  REGION 1..115: note = Synthetic Construct
AEVQLVESGGGLVQAGRSLRLSCAASGSTFSISSIGWFRQAPGKQRELVAIISSGGSTSYGHSVQGRFTISRDNAKNTVYLQMSSLNPEDTAVYYCYAVDDQMDYWARGPRSPSS

SEQ ID NO: 2025 - protein, 122 aa, synthetic construct
  REGION 1..122: note = Synthetic Construct
ADVQLVESGGGLVQPGGSLTLSCVASGFRFGGYIMSWVRRAPGQGTEWVSTIGSDGGRISYLDSVKGRFTISRGNAKNTVYLQMNSLKPEDTAVYYCYADVPYELGGRRQYWGQGTQVTVSS

SEQ ID NO: 2026 - protein, 120 aa, synthetic construct
  REGION 1..120: note = Synthetic Construct
AHVQLVESGGGLVQAGGSLRLSCVVSGRTYSDFIVGWFRQAPGKQREFVARVSDGGTTYGDSVRGRFTMSRDYDKNSASLQMNGLIPEDTAVYLCNTYARTTVSGWRHYWGRGTQVTVSS

SEQ ID NO: 2027 - protein, 125 aa, synthetic construct
  REGION 1..125: note = Synthetic Construct
AEVQLVESGGGLVQAGGSLRLSCAASGRTFRSSTLGWFRQAPGKGREFVARIIWSGGGSYYADSVKDRFTISADNTKKTAYLQMNSLKPEDTGVYYCASALYISDPTTVQDYDYWGQGTQVTVSS

SEQ ID NO: 2028 - protein, 126 aa, synthetic construct
  REGION 1..126: note = Synthetic Construct
AEVQLVESGGGLVQAGGSLRLSCAASGRTFSTYIMGWFRQAPGKEREFVAAIRWSGDATYYGDSVKGRFTISRDTAKNTLYLQMDRLQPEDTAVYYCAAAPSVRDLTTMRTAVFHWGQGTQVTVSS

SEQ ID NO: 2029 - protein, 129 aa, synthetic construct
  REGION 1..129: note = Synthetic Construct
AQVQLVESGGGLVQAGGSLRLSCAASGGTFSTYAMGWFRQAPGKEREFVSAIAWRGGVTYYGDAVKGRFTISRDNAKNTVYLEMNSLTPEDTAVYYCAADADPPASYATSEYSRHYDFWGQGTQVTVSS

SEQ ID NO: 2030 - protein, 123 aa, synthetic construct
  REGION 1..123: note = Synthetic Construct
AQVQLVESGGGLVQAGGSLRLSCVVSGRTYSDFIVGWFRQAPGKEREFVALISQSGGTTGYADSVKGRFTISRDNAANTVFLQMNSLKPEDTAVYYCAVRRIISTTPRDYEYWGQGTQVTVSS

SEQ ID NO: 2031 - protein, 127 aa, synthetic construct
  REGION 1..127: note = Synthetic Construct
AEVQLVESGGGLVQAGGSLRLSCAASGRTMSMYLMGWFRQAPGKEREFVARITASGGLTYYTDSVKGRFTISRDNAKNTGYLQMNNLKPEDTAVYYCAARVSTHASGSINERMYPYWGQGTQVTVSS

SEQ ID NO: 2032 - protein, 125 aa, synthetic construct
  REGION 1..125: note = Synthetic Construct
ADVQLVESGGGLVQAGGSLRLSCAASGRTFSSYAMGWFRQAPGKERDLVAAISWSGDRTYYADSVKGRFTISRDNAKNMAYLQMNSLKPEDTAVYYCAADMRDFNRDAPHEYDYWGQGTQVTVSS

SEQ ID NO: 2033 - protein, 124 aa, synthetic construct
  REGION 1..124: note = Synthetic Construct
AQVQLVESGGGLVQPGGSLRLSCVVSGFIFDEPNIGWFRQAPGKDREAVSCVSGDDSGTYYGDSVKGRFTISRDKAKRTIYLQMNSLKPEDTAVYYCTIQRSCHLPFDPTHDWRGRGTQVTVSS

SEQ ID NO: 2034 - protein, 128 aa, synthetic construct
  REGION 1..128: note = Synthetic Construct
ADVQLVESGGGLVQAGASLRLSCAVSERTVSSPVTGWFRQAPGKEREFVACISYRGSSIYYADAVKGRFTISRDNAKNTVYLQMSSLEPEDTAVYYCAAAPPTRAAAQLTLPRWYDYWGQGTQVTVSS

SEQ ID NO: 2035 - protein, 127 aa, synthetic construct
  REGION 1..127: note = Synthetic Construct
AQVQLVESGGGLVQAGGSLRLSCVASGGTFSSYAMGWFRQAPGKEREFVAAISRGGSTDYADSVKGRFTISRDNAKNTVYLQMNSLKPEDTAVYYCAADQSPLRFALPRSQGQYDYWGQGTQVTVSS

SEQ ID NO: 2036 - protein, 128 aa, synthetic construct
  REGION 1..128: note = Synthetic Construct
AQVQLVESGGGLVQAGGSLRLSCAASGRTFSSYAMGWFRQAPGKEREFVAAISWSGGSTYYADSVKGRFTISRDNAKNTVYLQMNSLKPEDSAVYYCAADRAPLRFSYSLSRDEYDYWGQGTQVTVSS

SEQ ID NO: 2037 - protein, 126 aa, synthetic construct
  REGION 1..126: note = Synthetic Construct
AHVQLVESGGGLVQAGGSLRLSCEASGRTFSSYAMGWFRQAPGKEREFVAAISQGGSTDYGDSTKGRFTISRDNAKNTVYLQMNSLKPEDTAVYYCAADQTPLRYAYSTRSQDYDYWGQGPRSPSS

SEQ ID NO: 2038 - protein, 129 aa, synthetic construct
  REGION 1..129: note = Synthetic Construct
AQVQLVESGGGLVQAGGSLRLSCAASGGTFSTYAMGWFRQAPGKEREFVSAIAWRGGVTYYGDAVKGRFTISRDNAKNTVYLEMNSLTPEDTAVYYCAADADPPASYATSEYSRHYGYWGQGTQVTVSS

SEQ ID NO: 2039 - protein, 123 aa, synthetic construct
  REGION 1..123: note = Synthetic Construct
AQVQLVESGGGLVQAGGSLRLSCAVSGRTFSFAAVAWFRQAPGKEREFVAGVTWNDGSPYYRDSVEGRFTISRDYDKSAVYLQMNSLKPEDTAIYYCGTTQTLATRVSAVDYWGQGTQVTVSS

SEQ ID NO: 2040 - protein, 127 aa, synthetic construct
  REGION 1..127: note = Synthetic Construct
AHVQLVESGGGLVQAGDSLRLSCAASGRTFSNYAMGWFRQAPGKEREFVAAIRSAPVYTDSVKGRFTISRGHDKNTIYLLMNSLRPEDTAVYYCAAEAYPTYCSDSQYGDRYQFWYWGQGTQVTVSS

SEQ ID NO: 2041 - protein, 126 aa, synthetic construct
  REGION 1..126: note = Synthetic Construct
AQVQLVESGGGLVQPGGSLTISCGASGRTLRSYNMGWFRQAPGKEREFVAASSWTGIGTHYADSVKDRFTISRDNIKNTLFLQMRSLKPEDTAVYYCAADSTLDRLHSAGSDYHYWGQGTQVTVSS

SEQ ID NO: 2042 - protein, 126 aa, synthetic construct
  REGION 1..126: note = Synthetic Construct
AQVQLVESGGGLVQAGGSLRLSCAYSRRTFSGYAMGWFRQYPGQERDFVAMITWKDANTYYADSVEGRFTISRDTAKNTMYLQMTSLKPEDTAVYYCAARTLYFTAYWQSQRYDQWGQGTQVTVSS

SEQ ID NO: 2043 - protein, 134 aa, synthetic construct
  REGION 1..134: note = Synthetic Construct
ADVQLVESGGGLVQPGDSMRLSCVASGLTFSRYTMAWFRQAPGKDRIFVAAVSKPGGSTYYADSVKGRFTISRDNAQNTVYLQMNSLKPEDTAVYYCAAISHIFAEDAPAMGLCWDQRSAFGYWGQGTQVTVSS

SEQ ID NO: 2044 - protein, 126 aa, synthetic construct
  REGION 1..126: note = Synthetic Construct
AHVQLVESGGGLVQAGDSLTLSCEASGRTLRSYNMGWFRQAPGKEREFVAASSWTGIGTYYADSVKGRFTISRDNLKNTLFLQMESLKPEDTAVYYCAADSTLDRLHSAGTDYRDWGQGTQVTVSS

SEQ ID NO: 2045 - protein, 126 aa, synthetic construct
  REGION 1..126: note = Synthetic Construct
AHVQLVESGGGLVQAGGSLRLSCEVHGHIYGPYRMGWFRQAPGKERELVAAIRWSDNSIFYAEFVKGRFTISRDNARNSMVLQMNSLKPEDTAVYYCSAQATSGYGPETFRAWNYWGQGTQVTVSS

SEQ ID NO: 2046 - protein, 129 aa, synthetic construct
  REGION 1..129: note = Synthetic Construct
AHVQLVESGGGLVQAGGSLRLSCAASGGAFSRYDMGWFRQAPGKEREFVVAIGRTGAKTYASDSVKGRFTISRDNAKNTVLLQMNSLKPEDTAVYYCAADTDPKYALHATDQSRDYDVWGRGTQVTVSS

SEQ ID NO: 2047 - protein, 128 aa, synthetic construct
  REGION 1..128: note = Synthetic Construct
ADVQLVESGGGLVQAGGSLRLSCAASGRTFSSYAMGWFRQAPGKEREFVGAISRSGGGTEYLDSVKGRFTISRDNAKNTVYLQMNSLKPEDTAVYYCAADLSPLWHGIPTTARQYDSWGQGTQVTVSS

SEQ ID NO: 2048 - protein, 125 aa, synthetic construct
  REGION 1..125: note = Synthetic Construct
ADVQLVESGGGLVQAGGSLRLSCVASGGTLSTYMVGWFRQAPGKERDFVAGISWSGRSTDYEDAVKGRFAISRDAAGVYLQMNTLQPEDTGAYYCAARKVDYSSDYVTNYNYDYWGQGTQVTVSS

SEQ ID NO: 2049 - protein, 123 aa, synthetic construct
  REGION 1..123: note = Synthetic Construct
AQVQLVESGGGLVQAGGSLRLSCAASGSTFSGNAVGWFRQTPGKERELVATITATSATEFANSVKGRFTISRDNAKNTVYLQMNSLKPEDTAVYYCNTCKFRLSVLCHPGQDYWARGPRSPSS

SEQ ID NO: 2050 - protein, 128 aa, synthetic construct
  REGION 1..128: note = Synthetic Construct
AHVQLVESGGGLVQTGGSLRLSCKVSGYTFSIFPLAWFRQAPGKEREFVSGIRWNGHSRDYEEYADFAKGRFTISRDNAKNMVYLQMISLKPEDTALYYCAASDGVIDGTNANSYRYWGQGTQVTVSS

SEQ ID NO: 2051 - protein, 131 aa, synthetic construct
  REGION 1..131: note = Synthetic Construct
AQVQLVESGGGLVQSGGSLRLSCVASGFDLDDYAIGWFRQAPGKEREGVSCIGLKNGMTYYADSVKGRFTISVDIAKNTLFLQMNSLKPEDTAVYYCAAVSKLFARDYADWWSGLFSFGYKGQGTQVTVSS

SEQ ID NO: 2052 - protein, 124 aa, synthetic construct
  REGION 1..124: note = Synthetic Construct
AEVQLVESGGGLVQAGGSLRLSCAASGRTFSTYIMGWFRQAPGKEREFVAAIRWSGDATYYGDSVKGRFTISRDNAKNAVYLQMNSLKPEDTAVYYCAANPYYDGNLPQGYSFWGQGTQVTVSS

SEQ ID NO: 2053 - protein, 120 aa, synthetic construct
  REGION 1..120: note = Synthetic Construct
AEVQLVESGGGLVQAGGSLRLSCAASGRTFSNYVMGWFRQAPGKEREFVAHISWTLGITYYADSVKGRFTISRDNGKNTVYLQMNSLKPEDTAVYYCAARPTGGESFGSWGQGTQVTVSS

SEQ ID NO: 2054 - protein, 124 aa, synthetic construct
  REGION 1..124: note = Synthetic Construct
AQVQLVESGGGLVQAGTSVRLSCAASGRAINTVGLAWFRQTPGQRREFVAGVEIGGALRYADSVQGRFTVSRDNAKNTMYLQMNNLEPGDTAVYYCGAPRGYNIGKNPIGYTDWGQGTQVTVSS

SEQ ID NO: 2055 - protein, 129 aa, synthetic construct
  REGION 1..129: note = Synthetic Construct
AHVQLVESGGGLVQAGGSLRLSCAASGRTFSNLAMAWFRQAPGKEREFVAAITWSGDRTNYADSVKGRFTISRENAKNTAYLQMNILKPEDTAVYYCAADSGSSGGVYPSRDLYRYDYWGQGTQVTVSS

SEQ ID NO: 2056 - protein, 131 aa, synthetic construct
  REGION 1..131: note = Synthetic Construct
AHVQLVESGGGLVQAGESLTLSCAASGVISSIYAMGWFRQAPGKGREGVGCSDYSDDSKYYANSVKGRFTISRDNAKNTVYLQMNNLQPEDTAVYYCATDPSVYPGIIPTQWARVDLWDYWGQGTQVTVSS

SEQ ID NO: 2057 - protein, 125 aa, synthetic construct
  REGION 1..125: note = Synthetic Construct
ADVQLVESGGRLVQAGGSLRLSCVGSGRTLSNYAMGWFRQAPGKEKEFVASINWMRRDTYYADSVKGRFTISDDGHNAVSLQMNNLKPEDTAVYYCVADRFLSESMSDRADHDYWGQGTQVTVSS

SEQ ID NO: 2058 - protein, 123 aa, synthetic construct
  REGION 1..123: note = Synthetic Construct
AQVQLVESGGGLVQAGGSLRLSCVASGTGFEPNAMAWYRQAAGKQRELVAGVTSGGNANYADSVKGRFTISRDNVKNTVYLQMNSLKPEDTAVYYCNAVGPGINPPGKPTNYWGQGTQVTVSS

SEQ ID NO: 2059 - protein, 127 aa, synthetic construct
  REGION 1..127: note = Synthetic Construct
AQVQLVESGGGLVQPGGSLRLSCAVSGRTNSTYNMGWFRQAPGAEREFVAAIRWSGERTYYADSVKGRFTISRDNARNTVYLQMSSLKPEDTAVYYCAASRTGRYYVFMAVSEYGYWGQGTQVTVSS

SEQ ID NO: 2060 - protein, 134 aa, synthetic construct
  REGION 1..134: note = Synthetic Construct
AHVQLVESGGGLVQPGGSLRLSCAASGRTLSNYAMGWFRQAPGKEREFVGVIRQRTGMKSYTYYEESVKGRFTISGDGAKMTVSLQMNSLKPEDTAVYYCAIDLIEDYKSTYYYSTQPSSYDYWGQGTQVTVSS

SEQ ID NO: 2061 - protein, 128 aa, synthetic construct
  REGION 1..128: note = Synthetic Construct
ADVQLVESGGGLVQAGGSLRLSCAASGGTFSTYAMGWFRQAPGKEREFVSAIAWRGGVTYYGDAVKGRFTISRDNAKNTVYLEMNSLTPEDTAVYYCAADADPPASYATSEYSRHYDYWARGPRSPSS

SEQ ID NO: 2062 - protein, 127 aa, synthetic construct
  REGION 1..127: note = Synthetic Construct
AEVQLVESGGGLVQPGGSLRLSCVASGGTFSSYAMGWFRQAPGKERDFFAAISRGGSTDYADSVKGRFTISRDNAKNTVYLQMNSLKPEDTAVYYCAADRAPLLYGLPRSQGQYDYWGQGTQVTVSS

SEQ ID NO: 2063 - protein, 130 aa, synthetic construct
  REGION 1..130: note = Synthetic Construct
AHVQLVESGGGLVQAGGSLRLSCAASGFTLEDYAIGWFRQAPGKGREWISCISSSDGSTRYSDSVKGRFTISRDNAKNTIYLQMNSLKPEDTGVYYCARDWAQTCPAYGSSRYITDFVSWGQGTQVTVSS

SEQ ID NO: 2064 - protein, 126 aa, synthetic construct
  REGION 1..126: note = Synthetic Construct
AHVQLVESGGGLVQAGGSLRLSCAASGSTFSGNAVGWFRQTPGKERELVATITATSATEFANSVKGRFTISRDNAKNTVYLHLKSLKPEDTAVYYCAADRAPFGIPKVTPGAYDYWGQGTQVTVSS

SEQ ID NO: 2065 - protein, 127 aa, synthetic construct
  REGION 1..127: note = Synthetic Construct
AQVQLVESGGGSVQAGGSLRLSCVATGTGTYFPIMGVGWYRQVPGNDERELIAAITSGGIIKYEDDVKGRFTISRDNAKNMVYLQMNSLKPEDTAVYYCKAEHTIVGGGDLRVNEYWGRGTQVTVSS

SEQ ID NO: 2066 - protein, 125 aa, synthetic construct
  REGION 1..125: note = Synthetic Construct
AEVQLVESGGGSVQTGGSLRLSCAASGTIHRIYDMGWYRQAPGKQRELVATTSIAPSRTNYADSVKDRFTISRDDAKNTVYLQMNSLMPEDTAVYYCKMNIGDYRRDPYTGHDTWGQGTQVTVSS

SEQ ID NO: 2067 - protein, 118 aa, synthetic construct
  REGION 1..118: note = Synthetic Construct
AQVQLVESGGGLVQTGGSLRLSCAASASIFSMFVMGWYRQAPGKQRELVAAITRGGNTNYADSVKDRFTISRDDSKNTLYLQMNSLKPEDTATYYCKGSLYPSVRDYWGQGTQVTVSS

SEQ ID NO: 2068 - protein, 126 aa, synthetic construct
  REGION 1..126: note = Synthetic Construct
AQVQLVESGGGLVQAGGSLRLTCAASGGTFSTSTMDMGWFRQAPGKEREFVAVHAWNDGRAYYADSVKGRFTISRDSAKTTLYLQMNSLKPEDTAVYYCAAETYSIYEKDSSWDYWGQGTQVTVSS

SEQ ID NO: 2069 - protein, 126 aa, synthetic construct
  REGION 1..126: note = Synthetic Construct
AQVQLVESGGRLVQAGGSLRLSCAASGRTFSTSIMGWFRQGPGKEREFVSAIARNGVATFYADSVQGRFTISRDNPSNTVYLQMNSLKPEDTGVYYCAAKPRGVGLTDRLSDYEYWGQGTQVTVSS

SEQ ID NO: 2070 - protein, 116 aa, synthetic construct
  REGION 1..116: note = Synthetic Construct
AHVQLVESGGGLVQAGGSLRLSCAASGRTFSSYAMGWTRQAPGKQREQVASITLGGSVHYADSVKGRFTISRDNAKDALYLQMKELEPDDTAVYHCWGTAAAGNYEGLGTQVTVSS

SEQ ID NO: 2071 - protein, 130 aa, synthetic construct
  REGION 1..130: note = Synthetic Construct
AHVQLVESGGGFVQFGGSLRLSCQATGFSLNGYTMGWFRQAPGKEREGISCIGSPIENTYYADSVKGRFTISRDNAKNMVFLEMNSLKPEDTAVYFCARRWTHGLITSAHRMGADDYDYWGQGTQVTVSS

SEQ ID NO: 2072 - protein, 125 aa, synthetic construct
  REGION 1..125: note = Synthetic Construct
ADVQLVESGGGSVQTGGSLRLSCAASGTIHRIYDMGWYRQAPGKQRELVATTSIAPSRTNYADSVKDRFTISRDDAKNTVYLQMNSLMPEDTAVYYCKMNIGDYRRDPYTGYDYWGQGTQVTVSS

SEQ ID NO: 2073 - protein, 119 aa, synthetic construct
  REGION 1..119: note = Synthetic Construct
AHVQLVESGGGLVQPGGSLRLSCAASGGTLKYYTTGWYRQAPGKEREAVSCISSDGRDYYADSVKGRFTISRDNDKNVAYLQMNSLKPEDTAVYYCATDCGSPTLIPYWGQGTQVTVSS

SEQ ID NO: 2074 - protein, 128 aa, synthetic construct
  REGION 1..128: note = Synthetic Construct
AQVQLVESGGGLVQAGGSLRLSCAASGRTFSTYAMAWFRQAPGKEREFVAGVARSADTTYYGDSVKGRFTISRDNAKNEVNLQMSSLKPEDTAVYYCAARSVIQDYIVPGNDFHYEYWGQGTQVTVSS

SEQ ID NO: 2075 - protein, 117 aa, synthetic construct
  REGION 1..117: note = Synthetic Construct
AQVQLVESGGGLVQAGGSLRLSCAASGSAFSIASIGWYRQAPGKQRELLASIGNTGRTDYADSVKGRFTISRDNAKTTVHLQMNSLKPEDTAIYYCNYRDAYLSKYWGQGTQVTVSS

SEQ ID NO: 2076 - protein, 125 aa, synthetic construct
  REGION 1..125: note = Synthetic Construct
ADVQLVESGGGLVQAGGSLRLSCAASGRTFSSYIMGWFRQAPGKEREFVGAITRTGGSTYYADSVKDRFTISRDNAKNTVYLQMNSLKPEDTAVYYCAAGGGVLLTDTPRRYDYWGQGTQVTVSS

SEQ ID NO: 2077 - protein, 116 aa, synthetic construct
  REGION 1..116: note = Synthetic Construct
AHVQLVESGGGLVQAGGSLRLSCAASGSIFSISNDMGWYRQPPGKPRDLVAAISSDGRTSYADSVKGRFTISRDDAKKTVSLQMNSLKPDDTAVYYCNVWPSQTYWGRGTQVTVSS

SEQ ID NO: 2078 - protein, 126 aa, synthetic construct
  REGION 1..126: note = Synthetic Construct
AHVQLVESGGGLVQAGGSLRLSCAASGSAFSGGSTFSRSAIGWYRQAPGNQRELVASISSGGVTNYADSVKGRFTISRDNAKNTHHLQMNSLIAEDTAVYYCKLTTRVFNLPRDYWGQGTQVTVSS

SEQ ID NO: 2079 - protein, 124 aa, synthetic construct
  REGION 1..124: note = Synthetic Construct
AHVQLVESGGGLVQPGGSLRLSCVASGLTFSRYTMAWFRQAPGKERVFVAAVSKPGGSTYYADSVKGRFTISRDNAKNTVYLQTSRLNPDDTAVYSCAADLTVLLTANPGHYKYWARGPRSPSS

SEQ ID NO: 2080 - protein, 125 aa, synthetic construct
  REGION 1..125: note = Synthetic Construct
AHVQLVESGGGLVQPGGSLRLSCVASGLTFSRYTMAWFRQAPGKDRIFVAAVSKPGGSTYYADSVKGRFTISRDNAKNTVYLQMNSLKPDDTAVYSCAADLTVLLTANPAHYNYLGHGTQVTVSS

SEQ ID NO: 2081 - protein, 120 aa, synthetic construct
  REGION 1..120: note = Synthetic Construct
ADVQLVESGGGLVQAGGSLRLSCAASGRTFSVGAMGWFRQAPGKEREFVARIAWISTSTYYADSVKGRFTISKDNARNTVYLQMNSLKPEDTAVYYCAASRLGGSSYDNWGQGTQVTVSS

SEQ ID NO: 2082 - protein, 127 aa, synthetic construct
  REGION 1..127: note = Synthetic Construct
AHVQLVESGGGLVQAGDSLRLSCTASGDTFSAYAMGWFRQVPGKAREFVAGIARSGSNYYGDSVKGRFTISRDNVKNTVYLQMNSLKAEDTGVYYCAADRAILYHGLSQRTQNYAYWGPGTQVTVSS

SEQ ID NO: 2083 - protein, 126 aa, synthetic construct
  REGION 1..126: note = Synthetic Construct
ADVQLVESGGGLVQAGGSLRLSCAASGGTFSTSDIGWAWFRQAPGTEREFVGAIRGGPFRPVYADSVEGRFAISRANAKNTVYLQMNSLKPEDTAVYYCAAAKGRYGSIWNDCDYWGQGTQVTVSS

SEQ ID NO: 2084 - protein, 124 aa, synthetic construct
  REGION 1..124: note = Synthetic Construct
AHVQLVESGGGLVQAGGSLRLSCTTSGLTLSRYSMAWFRQAPGKEREFVAAISRDGGRTPYVASAKGRFTISRDDAKGTMYLQMNSLRLEDTAVYYCNARLLTPPPILDLKEYWGQGTQVTVSS

SEQ ID NO: 2085 - protein, 124 aa, synthetic construct
  REGION 1..124: note = Synthetic Construct
AHVQLVESGGGLVQAGGSLRLSCAASGTINRIYDIAWYRQIPAKQRELVATITYNSRTNYADSVKGRFTISRDDAQNAAYLQMDNLMPEDTAVYYCKMSIGDYMRDPYTGSDTWGQGTQVTVSS

SEQ ID NO: 2086 - protein, 130 aa, synthetic construct
  REGION 1..130: note = Synthetic Construct
AHVQLVESGGGLVQPGGSLLLSCAASGFTLEDYAIGWFRQAPGKGREWVSCISSSDGGTRFIDSVKGRFTISRDNHKNTVYLQMNSLKPEDTGVYYCARDWAHTCPAYGSRRYITDFSSWGQGTQVTVSS

SEQ ID NO: 2087 - protein, 126 aa, synthetic construct
  REGION 1..126: note = Synthetic Construct
AEVQLVESGGGLVQAGGSLRLSCAASGRTLRSYNMGWFRQAPGKAREFVAALSWTGLGTYYADFVRGRFTISRDVTENTLYLQMDSLQPEDAAVYYCAADSTLDRLHSAESDYRDWGQGTQVTVSS

SEQ ID NO: 2088 - protein, 127 aa, synthetic construct
  REGION 1..127: note = Synthetic Construct
AQVQLVESGGGLVEAGGSLRLSCAASGLTFSNYAMAWFRQSPGKEREFVAVISIGRSTDYADPVKGRFTISRDNAKNTVYLQMNSLKPEDTAAYYCAADQAPLRFSYSLDRDKYDYWGQGTQVTVSS

SEQ ID NO: 2089 - protein, 119 aa, synthetic construct
  REGION 1..119: note = Synthetic Construct
AHVQLVESGGGLVQTGGSTTLSCGDSGNIVTLSRSSISWYRRAPGLQREWIAGISINGNTNAIDSLKGRFTIWRDGAKNSAYLRMNSLKPEDTAVYYCELIPPDDKNYGGQGTQVTVSS

SEQ ID NO: 2090 - protein, 117 aa, synthetic construct
  REGION 1..117: note = Synthetic Construct
AHVQLVESGGGLVQAGGSLTLSCAASGRTWSISSIGWYRQAPGKQRELIASVGNTGRTSYVDSVKDRFTISRDNAKNTVHMQMDSLKPEDTAIYYCNYRDAYGSEYWGQGTQVTVSS

SEQ ID NO: 2091 - protein, 128 aa, synthetic construct
  REGION 1..128: note = Synthetic Construct
AEVQLVESGGGSVQAGDSLRLSCAASGRTFSNFAAGWFRQAPGKEREFVAVIDWNGGSSYYADSVKGRFTISRDNAKNTVYLQMNRLKPGDTAVYICAIGGNHYDPSKDYIADEYDYWGQGTQVTVSS

SEQ ID NO: 2092 - protein, 121 aa, synthetic construct
  REGION 1..121: note = Synthetic Construct
AHVQLVESGGGLVQAGGSLKLSCVPSTNIFSANAMGWYRQRPGKERELVAGITSGGNANYADSVKGRFTISRDNADTVILQMNSLKPEDTAVYYCKGTAYSTTYHSVRDYWGQGTQVTVSS

SEQ ID NO: 2093 - protein, 128 aa, synthetic construct
  REGION 1..128: note = Synthetic Construct
AQVQLVESGGELVQAGGSLRLSCAASGRTFSNYAMGWFRQAPGKEREFVAAMPWSGGSTYYADSVKGRFTISRDNAKNTVYLQMNSLKPEDTAVYYCAARAVKFGSSWYRISAEYYYWGQGTQVTVSS

SEQ ID NO: 2094 - protein, 121 aa, synthetic construct
  REGION 1..121: note = Synthetic Construct
ADVQLVESGGGLVQAGESLRLSCVASGSISSINAMGWFRQAPGKQRELVASISNIHTTLYAESVKGRFTISRDTAKNTADLQMDSLKPEDTAIYYCNLRQDCSYDGCDEYWGQGTQVTVSS

SEQ ID NO: 2095 - protein, 125 aa, synthetic construct
  REGION 1..125: note = Synthetic Construct
ADVQLVESGGGSVQTGGSLRLSCVASGDIHRIYDMGWYRQAPGKQRELVATTSIAPSRTNYADSVKDRFTISRDDAKNTVYLQMNSLMPEDTAVYYCKMNIGDYRHDPYTGYDTWGQGTQVTVSS

SEQ ID NO: 2096 - protein, 121 aa, synthetic construct
  REGION 1..121: note = Synthetic Construct
AEVQLVESGGGLVQPGGSLRLSCAASGITLDYYTIGWFRQAPGKEREGVSCISSSDGTTSYADSVKGRFTISRDDGGDTTYLQMNSLSPEDTAVYYCNAVGRIFADTYNLWGQGTQVTVSS

SEQ ID NO: 2097 - protein, 125 aa, synthetic construct
  REGION 1..125: note = Synthetic Construct
AEVQLVESGGGSVQTGGSLRLSCAASGTIHRIYDMGWYRQAPGKQRELVATTSIAPSRTNYADSVKDRFTISRDDAKNTVYLQMNSLMPEDTAVYYCKMNIGDYSRDPYTGYDTWGQGTQVTVSS

SEQ ID NO: 2098 - protein, 119 aa, synthetic construct
  REGION 1..119: note = Synthetic Construct
AQVQLVESGGGLVQAGGSLRLSCAASGNFFSLNFMSWHRQSPGKQRELVAGITGDGITNYTDAVAGRFTISRDNAKNAVYLQMNSLKPEDTAVYYCNAVRQTLTHFTSWGQGTQVTVSS

SEQ ID NO: 2099 - protein, 123 aa, synthetic construct
  REGION 1..123: note = Synthetic Construct
AQVQLVESGGGLVQAGGSLRLSCVASGSGFEPNAMAWYRQAPGKQRELVAGITSGGNPNYADAVKGRFTISRDNVKSTVYLQMNSLKPEDTAVYYCNAVGPGLNPRGSPTNYWGQGTQVTVSS

SEQ ID NO: 2100 - protein, 123 aa, synthetic construct
  REGION 1..123: note = Synthetic Construct
AHVQLVESGGGLVQAGGSLRLSCVVSGRTYSDFIVGWFRQAPGKEREFVALISQSGGTTGYADSVKGRFTISRDNAANTVFLQMNSLKPEDTAVYYCAVGRLISTTPRDYEYWGQGTQVTVSS

SEQ ID NO: 2101 - protein, 127 aa, synthetic construct
  REGION 1..127: note = Synthetic Construct
ADVQLVESGGGLVQAGDSLRLSCAASGRTFSNYAMGWFRQAPGKEREFVAAIRSAPVYTDSVKGRFTISRGHDKNTIYLLMNSLRPEDTAVYYCAAEAYPTYCSDSQYGDRYQFGYWGQGTQVTVSS

SEQ ID NO: 2102 - protein, 127 aa, synthetic construct
  REGION 1..127: note = Synthetic Construct
ADVQLVESGGGLVQAGGSLRLSCEASGRTFSSYAMGWFRQAPGKEREFVAAISQGGSTDYGDSTKGRFTISRDNAKNTVYLQMNSLKPEDTAVYYCAADQTPLRYAYSIRSQDYDYWGQGTQVTVSS

SEQ ID NO: 2103 - protein, 122 aa, synthetic construct
  REGION 1..122: note = Synthetic Construct
AQVQLVESGGGLVQTGGSLRLSCAASGRTYVMGWFRQAPGKEREFVAAITWSGRTIDYVDFVKGRFTISRDNAKNTVYLQMNSLKPEDTAVYYCAARREVLSITRDFPPDYWGQGTQVTVSS

SEQ ID NO: 2104 - protein, 117 aa, synthetic construct
  REGION 1..117: note = Synthetic Construct
AQVQLVESGGGLVQPGGSLRLSCAASGLSFSTYAMTWVRQSPGKGPEWVSAINSGGDSTTYKDSVKGRFTMSRDNAKNTLYLQMNSLKPEDTAVYFCVKGMVKYDYWGQGTQVTVSS

SEQ ID NO: 2105 - protein, 126 aa, synthetic construct
  REGION 1..126: note = Synthetic Construct
AEVQLVESGGGLVQPGGSLRLSCAASGFTFSTYAMSWVRQAPGKGREWVAGIQREGTETNYADSVKGRFTISRDNVKNTLYLQMNSLKPEDTALYYCAKVLGRPYGSSWLDDMDALGKGTQVTVSS

SEQ ID NO: 2106 - protein, 125 aa, synthetic construct
  REGION 1..125: note = Synthetic Construct
AQVQLVESGGGLVQPGASLRLSCVTSESAGSINAIGWYRQAPGKERELVASVSGGGTAYYVDAVKGRFTISRTISTDNRKTTVDLQMNNLKPEDTAVYYCNIHDGNTAYRSGLYWGQGTQVTVSS

SEQ ID NO: 2107 - protein, 125 aa, synthetic construct
  REGION 1..125: note = Synthetic Construct
AHVQLVESGGGSVQTGGSLRLSCVASGDIHRIYDMGWYRQAPGKQRELVATTSIAPSRTNYADSVKDRFTISRDDAKNTVYLQMNSLMPEDTAVYYCKMNIGDYRRDPHTGYDTWGQGTQVTVSS

SEQ ID NO: 2108 - protein, 125 aa, synthetic construct
  REGION 1..125: note = Synthetic Construct
AHVQLVESGGGLVQAGDSLRLSCAASQLTFSRYVLGWFRQAPGQEREFVAASSWRGGSTYYADSVKGRSTISRDNAKNTVYLQMDSLKPEDTAVYYCAARFAYDISTTTHGYGYWGRGTQVTVSS

SEQ ID NO: 2109 - protein, 124 aa, synthetic construct
  REGION 1..124: note = Synthetic Construct
ADVQLVESGGGLVQAGGSLRLSCAASGSTFSGNAIGWYRQAPGKQRELVATINAPGSTDYAESVKGRFTISRDNAKNTVFLQMNSLKPEDTAVYYCNTCKCRLSVLCQPGQDYWGQGTQVTVSS

SEQ ID NO: 2110 - protein, 124 aa, synthetic construct
  REGION 1..124: note = Synthetic Construct
ADVQLVESGGGLVQAGGSLRLSCTASGRTFNNYHMGWFRQAPGKEREFVAVVSRSGGSTLDADSVKGRFTVSRDNAKNTVYLQMNSLKPEDTAVYYCAASRTAGLTSNRSLYVYWGQGPRSPSS

SEQ ID NO: 2111 - protein, 128 aa, synthetic construct
  REGION 1..128: note = Synthetic Construct
AQVQLVESGGGLVQAGGSLKLSCVASGRGVSRYTMAWFRQAVGKEREFISDITVPGGSTKTADSVKGRFTVSRDIAKNTVYLQMNSLKPEDTAVYYCAASPVLLVPQALVRSESYNTWGQGTQVTVSS

SEQ ID NO: 2112 - protein, 132 aa, synthetic construct
  REGION 1..132: note = Synthetic Construct
ADVQLVESGGGLVHTGGSLRLSCAASGFTLDSYPIGWFRQAPGKEREGVSCISSSDGSAYYSDSVKGRFTISRDTAKNTIYLQMNSLKPEDTAVYYCATDLMRRMMYGKSWWCLNPNDFGSWGQGTQVTVSS

SEQ ID NO: 2113 - protein, 117 aa, synthetic construct
  REGION 1..117: note = Synthetic Construct
AQVQLVESGGGLVQAGGSLRLSCAASGSAFSIASIGWYRQAPGKQRELLASIGNTGRTDYADSVKGRFTISRDNAKTTVHLQMNSLKPEDTAIYYCNYRDAYLSDYWGQGTQVTVSS

SEQ ID NO: 2114 - protein, 161 aa, synthetic construct
  REGION 1..161: note = Synthetic Construct
AEVQLVESGGGLVQAGGSLRLSCAASGSTFSGNAIGWYRQTPGKQRELVATITATSATDYENSVKGRFTISRDNAKNTVYLQMNSLKPEDTAVYYCNTCKFGLSLICHPGQDYWGQGTQVTVSSEPKTPKPQPQPQPQPQPNPTTESKCPKCPAPELLGGP

SEQ ID NO: 2115 - protein, 33 aa, synthetic construct
  REGION 1..33: note = Synthetic Construct
EGKSSGSGSESKSTGGGGSEGKSSGSGSESKST

SEQ ID NO: 2116 - protein, 1273 aa, synthetic construct
  REGION 1..1273: note = Synthetic Construct
MFVFLVLLPLVSSQCVNLTTRTQLPPAYTNSFTRGVYYPDKVFRSSVLHSTQDLFLPFFSNVTWFHAIHVSGTNGTKRFDNPVLPFNDGVYFASTEKSNIIRGWIFGTTLDSKTQSLLIVNNATNVVIKVCEFQFCNDPFLGVYYHKNNKSWMESEFRVYSSANNCTFEYVSQPFLMDLEGKQGNFKNLREFVFKNIDGYFKIYSKHTPINLVRDLPQGFSALEPLVDLPIGINITRFQTLLALHRSYLTPGDSSSGWTAGAAAYYVGYLQPRTFLLKYNENGTITDAVDCALDPLSETKCTLKSFTVEKGIYQTSNFRVQPTESIVRFPNITNLCPFGEVFNATRFASVYAWNRKRISNCVADYSVLYNSASFSTFKCYGVSPTKLNDLCFTNVYADSFVIRGDEVRQIAPGQTGKIADYNYKLPDDFTGCVIAWNSNNLDSKVGGNYNYLYRLFRKSNLKPFERDISTEIYQAGSTPCNGVEGFNCYFPLQSYGFQPTNGVGYQPYRVVVLSFELLHAPATVCGPKKSTNLVKNKCVNFNFNGLTGTGVLTESNKKFLPFQQFGRDIADTTDAVRDPQTLEILDITPCSFGGVSVITPGTNTSNQVAVLYQDVNCTEVPVAIHADQLTPTWRVYSTGSNVFQTRAGCLIGAEHVNNSYECDIPIGAGICASYQTQTNSPRRARSVASQSIIAYTMSLGAENSVAYSNNSIAIPTNFTISVTTEILPVSMTKTSVDCTMYICGDSTECSNLLLQYGSFCTQLNRALTGIAVEQDKNTQEVFAQVKQIYKTPPIKDFGGFNFSQILPDPSKPSKRSFIEDLLFNKVTLADAGFIKQYGDCLGDIAARDLICAQKFNGLTVLPPLLTDEMIAQYTSALLAGTITSGWTFGAGAALQIPFAMQMAYRFNGIGVTQNVLYENQKLIANQFNSAIGKIQDSLSSTASALGKLQDVVNQNAQALNTLVKQLSSNFGAISSVLNDILSRLDKVEAEVQIDRLITGRLQSLQTYVTQQLIRAAEIRASANLAATKMSECVLGQSKRVDFCGKGYHLMSFPQSAPHGVVFLHVTYVPAQEKNFTTAPAICHDGKAHFPREGVFVSNGTHWFVTQRNFYEPQIITTDNTFVSGNCDVVIGIVNNTVYDPLQPELDSFKEELDKYFKNHTSPDVDLGDISGINASVVNIQKEIDRLNEVAKNLNESLIDLQELGKYEQYIKWPWYIWLGFIAGLIAIVMVTIMLCCMTSCCSCLKGCCSCGSCCKFDEDDSEPVLKGVKLHYT

SEQ ID NO: 2117 - protein, 122 aa, synthetic construct
  REGION 1..122: note = Synthetic Construct
HVQLVESGGGLVQPGGSLRLSCAASGRSFNSYLMGWFRQAPGKEREFVAWISGSPHDIIRYRDSVKDRFTISRDNAKNTVYLQMNSLKPVDTAVYYCAVGSLRVGSFSPDYWGQGTQVTVSS

SEQ ID NO: 2118 - protein, 122 aa, synthetic construct
  REGION 1..122: note = Synthetic Construct
HVQLVESGGGLVQAGGSLRLSCAAPGRTFSTSAMGWFRQAPGKEREFVAAIDWSNTNIHYADTVKGRFTISTDTAKNTVYLQMNNLKPEDTAVYYCAQGGWGLTQPISVDYWGKGTQVTVSS

SEQ ID NO: 2119 - protein, 121 aa, synthetic construct
  REGION 1..121: note = Synthetic Construct
QVQLVESGGGLVQAGGSLRLSCAASGRDFSSTVMGWFRQAPGKERELVAWMTVTYDITYYADSVKGRFTISKDNAKNTVYLQANSLKPDDTAVYYCASGALRVGSFSPDYWGQGTQVTVSS

SEQ ID NO: 2120 - protein, 1261 aa, synthetic construct
  REGION 1..1261: note = Synthetic Construct
SQCVNLTTRTQLPPAYTNSFTRGVYYPDKVFRSSVLHSTQDLFLPFFSNVTWFHAIHVSGTNGTKRFDNPVLPFNDGVYFASTEKSNIIRGWIFGTTLDSKTQSLLIVNNATNVVIKVCEFQFCNDPFLGVYYHKNNKSWMESEFRVYSSANNCTFEYVSQPFLMDLEGKQGNFKNLREFVFKNIDGYFKIYSKHTPINLVRDLPQGFSALEPLVDLPIGINITRFQTLLALHRSYLTPGDSSSGWTAGAAAYYVGYLQPRTFLLKYNENGTITDAVDCALDPLSETKCTLKSFTVEKGIYQTSNFRVQPTESIVRFPNITNLCPFGEVFNATRFASVYAWNRKRISNCVADYSVLYNSASFSTFKCYGVSPTKLNDLCFTNVYADSFVIRGDEVRQIAPGQTGKIADYNYKLPDDFTGCVIAWNSNNLDSKVGGNYNYLYRLFRKSNLKPFERDISTEIYQAGSTPCNGVEGFNCYFPLQSYGFQPTNGVGYQPYRVVVLSFELLHAPATVCGPKKSTNLVKNKCVNFNFNGLTGTGVLTESNKKFLPFQQFGRDIADTTDAVRDPQTLEILDITPCSFGGVSVITPGTNTSNQVAVLYQDVNCTEVPVAIHADQLTPTWRVYSTGSNVFQTRAGCLIGAEHVNNSYECDIPIGAGICASYQTQTNSPRRARSVASQSIIAYTMSLGAENSVAYSNNSIAIPTNFTISVTTEILPVSMTKTSVDCTMYICGDSTECSNLLLQYGSFCTQLNRALTGIAVEQDKNTQEVFAQVKQIYKTPPIKDFGGFNFSQILPDPSKPSKRSFIEDLLFNKVTLADAGFIKQYGDCLGDIAARDLICAQKFNGLTVLPPLLTDEMIAQYTSALLAGTITSGWTFGAGAALQIPFAMQMAYRFNGIGVTQNVLYENQKLIANQFNSAIGKIQDSLSSTASALGKLQDVVNQNAQALNTLVKQLSSNFGAISSVLNDILSRLDKVEAEVQIDRLITGRLQSLQTYVTQQLIRAAEIRASANLAATKMSECVLGQSKRVDFCGKGYHLMSFPQSAPHGVVFLHVTYVPAQEKNFTTAPAICHDGKAHFPREGVFVSNGTHWFVTQRNFYEPQIITTDNTFVSGNCDVVIGIVNNTVYDPLQPELDSFKEELDKYFKNHTSPDVDLGDISGINASVVNIQKEIDRLNEVAKNLNESLIDLQELGKYEQYIKWPWYIWLGFIAGLIAIVMVTIMLCCMTSCCSCLKGCCSCGSCCKFDEDDSEPVLKGVKLHYT

SEQ ID NO: 2121 - protein, 223 aa, synthetic construct
  REGION 1..223: note = Synthetic Construct
RVQPTESIVRFPNITNLCPFGEVFNATRFASVYAWNRKRISNCVADYSVLYNSASFSTFKCYGVSPTKLNDLCFTNVYADSFVIRGDEVRQIAPGQTGKIADYNYKLPDDFTGCVIAWNSNNLDSKVGGNYNYLYRLFRKSNLKPFERDISTEIYQAGSTPCNGVEGFNCYFPLQSYGFQPTNGVGYQPYRVVVLSFELLHAPATVCGPKKSTNLVKNKCVNF

SEQ ID NO: 2122 - DNA, 69 bp, synthetic construct
  misc_feature 1..69: note = Synthetic Construct
  source 1..69: mol_type = other DNA
ccgctcgagtgctgcggccgcggtgcttttgctttcgccgctaccgctgcttttaccttcgctgccacc

SEQ ID NO: 2123 - DNA, 69 bp, synthetic construct
  misc_feature 1..69: note = Synthetic Construct
  source 1..69: mol_type = other DNA
cccaagcttgaaggtaaaagcagcggtagcggcgaaagcaaaagcaccggtggcggtggcagcgaaggt

SEQ ID NO: 2124 - protein, 609 aa, synthetic construct [sequence omitted]

SEQ ID NO: 2125 - protein, 124 aa, synthetic construct
  REGION 1..124: note = Synthetic Construct
AQVQLVESGGGLVQAGGSLRLSCTASGRTYEPLVMGWFRQAPGKEREFVATITPSGGSLSYADSVKGRFTVSRDNAKKTVYLQMNRLQPEDTAVYYCAAAPGVGNYRYTRQYDYWGQGTQVTVS

SEQ ID NO: 2126 - protein, 124 aa, synthetic construct
  REGION 1..124: note = Synthetic Construct
AEVQLVESGGGLVQAGGSLRLSCTASGRTFTPYTMGWFRQAPGKEREFVASILWSGNNRDYADSVKGRFAISRDNAKNTAYLQMTSLKPEDTAVYYCAAGDGLGFYRSVNQYDYWGQGTQVTVS

SEQ ID NO: 2127 - protein, 122 aa, synthetic construct
  REGION 1..122: note = Synthetic Construct
ADVQLVESGGGLVQAGGSLRLSCAASGGTISNYGMGWLRQGPGKEREFVGSINWNGATTHYADSVKGRFIISRDNAKNTVYLQMNSLKPEDTGVYYCVAQFSVQPTLQTYDYRGQGTQVTVS

SEQ ID NO: 2128 - DNA, 76 bp, synthetic construct
  misc_feature 1..76: note = Synthetic Construct
  source 1..76: mol_type = other DNA
cccaagcttggtggtggtggtagtggtggtggtggtagtggtggtggtggtagtcaagttcaactggttgaatctg

SEQ ID NO: 2129 - DNA, 41 bp, synthetic construct
  misc_feature 1..41: note = Synthetic Construct
  source 1..41: mol_type = other DNA
ccgctcgagtgcggccgccagtttgctactaacggtaactt

SEQ ID NO: 2130 - protein, 12 aa, synthetic construct
  REGION 1..12: note = Synthetic Construct
YCAARDIETAEY
